(19) United States
(12) Patent Application Publication
(10) Pub. No.: US 2026/0035693 A1
(43) Pub. Date: Feb. 5, 2026

(54) SYSTEMS AND METHODS FOR THE TREATMENT OF HEMOGLOBINOPATHIES

(71) Applicant: EDITAS MEDICINE, INC., Cambridge, MA (US)

(72) Inventors: Jennifer Leah GORI, Jamaica Plain, MA (US); Edouard AUPEPIN DE LAMOTHE-DREUZY, Boston, MA (US); Jack HEATH, Winchester, MA (US); John Anthony ZURIS, Boston, MA (US); KaiHsin CHANG, Medfield, MA (US)

(73) Assignee: EDITAS MEDICINE, INC., Cambridge, MA (US)

(21) Appl. No.: 18/893,308

(22) Filed: Sep. 23, 2024

Related U.S. Application Data
(63) Continuation of application No. 17/115,791, filed on Dec. 8, 2020, now abandoned.
Application No. 17/115,791 is a continuation-in-part of application No. 17/019,154, filed on Sep. 11, 2020, now Pat. No. 12,031,132.
Application No. 17/019,154 is a continuation of application No. PCT/US2019/022374, filed on Mar. 14, 2019.
(60) Provisional application No. 62/643,168, filed on Mar. 14, 2018.
(60) Provisional application No. 62/767,488, filed on Nov. 14, 2018.
(60) Provisional application No. 62/773,073, filed on Nov. 29, 2018.
(60) Provisional application No. 62/945,190, filed on Dec. 8, 2019.
(60) Provisional application No. 63/115,518, filed on Nov. 18, 2020.

(51) Int. Cl. C12N 15/11; A61K 35/28; C12N 9/22; C12N 15/10; C12N 15/90

(52) U.S. Cl. CPC C12N 15/111; A61K 35/28; C12N 9/22; C12N 15/102; C12N 15/907; C12N 2310/20; C12N 2310/315; C12N 2510/00

(57) ABSTRACT

Genome editing systems, guide RNAs, and CRISPR-mediated methods are provided for altering portions of the HBG1 and HBG2 loci, portions of the erythroid specific enhancer of the BCL11A gene, or a combination thereof, in cells and increasing expression of fetal hemoglobin.

### REFERENCE TO RELATED APPLICATIONS

[0001] This application is a continuation of U.S. patent application Ser. No. 17/115,791, filed Dec. 8, 2020, which is a continuation-in-part of U.S. patent application Ser. No. 17/019,154, filed Sep. 11, 2020, which is a continuation of International Patent Application No. PCT/US19/22374, filed Mar. 14, 2019, which claims priority to U.S. Provisional Patent Application No. 62/643,168, filed Mar. 14, 2018, U.S. Provisional Patent Application No. 62/767,488, filed Nov. 14, 2018, and U.S. Provisional Patent Application No. 62/773,073, filed Nov. 29, 2018. This application also claims priority to U.S. Provisional Patent Application No. 62/945,190, filed Dec. 8, 2019, and U.S. Provisional Patent Application No. 63/115,518, filed Nov. 18, 2020, all of which are incorporated herein by reference in their entirety, including drawings.

### SEQUENCE LISTING

[0002] This application contains a ST.26 compliant Sequence Listing, which was submitted in XML format via Patent Center, and is hereby incorporated by reference in its entirety. The XML copy, created on Sep. 5, 2025, is named Substitute Sequence Listing 1189458013US16.xml and is 1,910,000 bytes in size.

### FIELD

[0003] This disclosure relates to genome editing systems and methods for altering a target nucleic acid sequence, or modulating expression of a target nucleic acid sequence, and applications thereof in connection with the alteration of genes encoding hemoglobin subunits and/or treatment of hemoglobinopathies.

### BACKGROUND

[0004] Hemoglobin (Hb) carries oxygen in erythrocytes or red blood cells (RBCs) from the lungs to tissues. During prenatal development and until shortly after birth, hemoglobin is present in the form of fetal hemoglobin (HbF), a tetrameric protein composed of two alpha (α)-globin chains and two gamma (γ)-globin chains. HbF is largely replaced by adult hemoglobin (HbA), a tetrameric protein in which the γ-globin chains of HbF are replaced with beta (β)-globin chains, through a process known as globin switching. The average adult makes less than 1% HbF out of total hemoglobin (Them 2009). The α-hemoglobin gene is located on chromosome 16, while the β-hemoglobin gene (HBB), A gamma (Aγ)-globin chain (HBG1, also known as gamma globin A), and G gamma (Gγ)-globin chain (HBG2, also known as gamma globin G) are located on chromosome 11 within the globin gene cluster (also referred to as the globin locus).

[0005] Mutations in HBB can cause hemoglobin disorders (i.e., hemoglobinopathies) including sickle cell disease (SCD) and beta-thalassemia (β-Thal). Approximately 93,000 people in the United States are diagnosed with a hemoglobinopathy. Worldwide, 300,000 children are born with hemoglobinopathies every year (Angastiniotis 1998). Because these conditions are associated with HBB mutations, their symptoms typically do not manifest until after globin switching from HbF to HbA.

[0006] SCD is the most common inherited hematologic disease in the United States, affecting approximately 80,000 people (Brousseau 2010). SCD is most common in people of African ancestry, for whom the prevalence of SCD is 1 in 500. In Africa, the prevalence of SCD is 15 million (Aliyu 2008). SCD is also more common in people of Indian, Saudi Arabian and Mediterranean descent. In those of Hispanic-American descent, the prevalence of sickle cell disease is 1 in 1,000 (Lewis 2014).

[0007] SCD is caused by a single homozygous mutation in the HBB gene, c.17A>T (HbS mutation). The sickle mutation is a point mutation (GAG>GTG) on HBB that results in substitution of valine for glutamic acid at amino acid position 6 in exon 1. The valine at position 6 of the β-hemoglobin chain is hydrophobic and causes a change in conformation of the β-globin protein when it is not bound to oxygen. This change of conformation causes HbS proteins to polymerize in the absence of oxygen, leading to deformation (i.e., sickling) of RBCs. SCD is inherited in an autosomal recessive manner, so that only patients with two HbS alleles have the disease. Heterozygous subjects have sickle cell trait, and may suffer from anemia and/or painful crises if they are severely dehydrated or oxygen deprived.

[0008] Sickle shaped RBCs cause multiple symptoms, including anemia, sickle cell crises, vaso-occlusive crises, aplastic crises, and acute chest syndrome. Sickle shaped RBCs are less elastic than wild-type RBCs and therefore cannot pass as easily through capillary beds and cause occlusion and ischemia (i.e., vaso-occlusion). Vaso-occlusive crisis occurs when sickle cells obstruct blood flow in the capillary bed of an organ leading to pain, ischemia, and necrosis. These episodes typically last 5-7 days. The spleen plays a role in clearing dysfunctional RBCs, and is therefore typically enlarged during early childhood and subject to frequent vaso-occlusive crises. By the end of childhood, the spleen in SCD patients is often infarcted, which leads to autosplenectomy. Hemolysis is a constant feature of SCD and causes anemia. Sickle cells survive for 10-20 days in circulation, while healthy RBCs survive for 90-120 days. SCD subjects are transfused as necessary to maintain adequate hemoglobin levels. Frequent transfusions place subjects at risk for infection with HIV, Hepatitis B, and Hepatitis C. Subjects may also suffer from acute chest crises and infarcts of extremities, end organs, and the central nervous system.

[0009] Subjects with SCD have decreased life expectancies. The prognosis for patients with SCD is steadily improving with careful, life-long management of crises and anemia. As of 2001, the average life expectancy of subjects with sickle cell disease was the mid-to-late 50's. Current treatments for SCD involve hydration and pain management during crises, and transfusions as needed to correct anemia.

[0010] Thalassemias (e.g., β-Thal, δ-Thal, and β/δ-Thal) cause chronic anemia. β-Thal is estimated to affect approximately 1 in 100,000 people worldwide. Its prevalence is higher in certain populations, including those of European descent, where its prevalence is approximately 1 in 10,000. β-Thal major, the more severe form of the disease, is life-threatening unless treated with lifelong blood transfusions and chelation therapy. In the United States, there are approximately 3,000 subjects with β-Thal major. β-Thal intermedia does not require blood transfusions, but it may cause growth delay and significant systemic abnormalities, and it frequently requires lifelong chelation therapy. Although HbA makes up the majority of hemoglobin in adult RBCs, approximately 3% of adult hemoglobin is in the form of HbA2, an HbA variant in which the two γ-globin chains are replaced with two delta (Δ)-globin chains. δ-Thal is associated with mutations in the Δ hemoglobin gene (HBD) that cause a loss of HBD expression. Co-inheritance of the HBD mutation can mask a diagnosis of β-Thal (i.e., β/δ-Thal) by decreasing the level of HbA2 to the normal range (Bouva 2006). β/δ-Thal is usually caused by deletion of the HBB and HBD sequences in both alleles. In homozygous (δo/δo βo/βo) patients, HBG is expressed, leading to production of HbF alone.

[0011] Like SCD, β-Thal is caused by mutations in the HBB gene. The most common HBB mutations leading to β-Thal are: c.-136C>G, c.92+1G>A, c.92+6T>C, c.93-21G>A, c.118C>T, c.316-106C>G, c.25_26delAA, c.27_28insG, c.92+5G>C, c.118C>T, c.135delC, c.315+1G>A, c.-78A>G, c.52A>T, c.59A>G, c.92+5G>C, c.124_127delTTCT, c.316-197C>T, c.-78A>G, c.52A>T, c.124_127delTTCT, c.316-197C>T, c.-138C>T, c.-79A>G, c.92+5G>C, c.75T>A, c.316-2A>G, and c.316-2A>C. These and other mutations associated with β-Thal cause mutated or absent β-globin chains, which causes a disruption of the normal Hb α-hemoglobin to β-hemoglobin ratio. Excess α-globin chains precipitate in erythroid precursors in the bone marrow.

[0012] In β-Thal major, both alleles of HBB contain nonsense, frameshift, or splicing mutations that leads to complete absence of β-globin production (denoted β⁰/β⁰). β-Thal major results in severe reduction in β-globin chains, leading to significant precipitation of α-globin chains in RBCs and more severe anemia.

[0013] β-Thal intermedia results from mutations in the 5′ or 3′ untranslated region of HBB, mutations in the promoter region or polyadenylation signal of HBB, or splicing mutations within the HBB gene. Patient genotypes are denoted βo/β+ or β+/β+. Do represents absent expression of a β-globin chain; β+ represents a dysfunctional but present β-globin chain. Phenotypic expression varies among patients. Since there is some production of β-globin, β-Thal intermedia results in less precipitation of α-globin chains in the erythroid precursors and less severe anemia than β-Thal major. However, there are more significant consequences of erythroid lineage expansion secondary to chronic anemia.

[0014] Subjects with β-Thal major present between the ages of 6 months and 2 years, and suffer from failure to thrive, fevers, hepatosplenomegaly, and diarrhea. Adequate treatment includes regular transfusions. Therapy for β-Thal major also includes splenectomy and treatment with hydroxyurea. If patients are regularly transfused, they will develop normally until the beginning of the second decade. At that time, they require chelation therapy (in addition to continued transfusions) to prevent complications of iron overload. Iron overload may manifest as growth delay or delay of sexual maturation. In adulthood, inadequate chelation therapy may lead to cardiomyopathy, cardiac arrhythmias, hepatic fibrosis and/or cirrhosis, diabetes, thyroid and parathyroid abnormalities, thrombosis, and osteoporosis. Frequent transfusions also put subjects at risk for infection with HIV, hepatitis B and hepatitis C.

[0015] β-Thal intermedia subjects generally present between the ages of 2-6 years. They do not generally require blood transfusions. However, bone abnormalities occur due to chronic hypertrophy of the erythroid lineage to compensate for chronic anemia. Subjects may have fractures of the long bones due to osteoporosis. Extramedullary erythropoiesis is common and leads to enlargement of the spleen, liver, and lymph nodes. It may also cause spinal cord compression and neurologic problems. Subjects also suffer from lower extremity ulcers and are at increased risk for thrombotic events, including stroke, pulmonary embolism, and deep vein thrombosis. Treatment of β-Thal intermedia includes splenectomy, folic acid supplementation, hydroxyurea therapy, and radiotherapy for extramedullary masses. Chelation therapy is used in subjects who develop iron overload.

[0016] Life expectancy is often diminished in β-Thal patients. Subjects with β-Thal major who do not receive transfusion therapy generally die in their second or third decade. Subjects with β-Thal major who receive regular transfusions and adequate chelation therapy can live into their fifth decade and beyond. Cardiac failure secondary to iron toxicity is the leading cause of death in β-Thal major subjects due to iron toxicity.

[0017] A variety of new treatments are currently in development for SCD and β-Thal. Delivery of an anti-sickling HBB gene via gene therapy is currently being investigated in clinical trials. However, the long-term efficacy and safety of this approach is unknown. Transplantation with hematopoietic stem cells (HSCs) from an HLA-matched allogeneic stem cell donor has been demonstrated to cure SCD and β-Thal, but this procedure involves risks including those associated with ablation therapy, which is required to prepare the subject for transplant, increases risk of life-threatening opportunistic infections, and risk of graft vs. host disease after transplantation. In addition, matched allogeneic donors often cannot be identified. Thus, there is a need for improved methods of managing these and other hemoglobinopathies.

### SUMMARY

[0018] Provided herein in certain embodiments are first populations of modified cells comprising a plurality of modified CD34+ or hematopoietic stem cells with one or more indels in an HBG gene promoter. In certain of these embodiments, the plurality of modified cells include an indel in a CCAAT box target region.

[0019] In certain embodiments of the first populations of modified cells provided herein, one or more of the cells in the plurality of modified cells include a HBG1/2 c.-104 to -121 deletion in a HBG1 promoter, an HBG2 promoter, or both. In certain of these embodiments, HBG1/2 c.-104 to -121 deletions make up 1% or more, 1.5% or more, 2% or more, 2.5% or more. 3% or more, 3.5% or more, 4% or more, 4.5% or more, 5% or more, 5.5% or more, 6% or more, 6.5% or more, 7% or more, 7.5% or more, 8% or more, 8.5% or more, 9% or more, 9.5% or more, 10% or more, 10.5% or more, 11% or more, 11.5% or more, 12% or more, 12.5% or more, 13% or more, 13.5% or more, 14% or more, 14.5% or more, 15% or more, or 15.5% or more of the indels in the plurality of modified cells as a whole. In certain of these embodiments, HBG1/2 c.-104 to -121 deletions make up less than 25% of the indels in the plurality of modified cells as a whole.

[0020] In certain embodiments of the first populations of modified cells provided herein, 60% or more, 65% or more, 70% or more, 75% or more, 80% or more, 85% or more, 90% or more, or 95% or more of the indels in the plurality of modified cells as a whole are deletions of at least 4 base pairs.

[0021] In certain embodiments of the first populations of modified cells provided herein, 25% or more, 30% or more, 35% or more, 40% or more, 45% or more, 50% or more, 55% or more, 60% or more, or 65% or more of the indels in the plurality of modified cells as a whole are deletions of at least 4 base pairs introduced by a repair mechanism other than microhomology-mediated end joining (MMEJ) repair.

[0022] In certain embodiments of the first populations of modified cells provided herein, 25% or more, 30% or more, 35% or more, 40% or more, 45% or more, 50% or more, 55% or more, 60% or more, or 65% or more of the indels in the plurality of modified cells as a whole are deletions of at least 4 base pairs introduced by non-homologous end joining (NHEJ) repair, e.g., canonical NHEJ repair.

[0023] In certain embodiments of the first populations of modified cells provided herein, 50% or more, 55% or more, 60% or more, 65% or more, 70% or more, 75% or more, 80% or more, 85% or more, 90% or more, or 92% or more of the indels in the plurality of modified cells as a whole are deletions of 1 to 25 base pairs.

[0024] In certain embodiments of the first populations of modified cells provided herein, 50% or more, 55% or more, 60% or more, 65% or more, 70% or more, 75% or more, 80% or more, or 85% or more of the indels in the plurality of modified cells as a whole are deletions of 3 to 25 base pairs.

[0025] In certain embodiments of the first populations of modified cells provided herein, 50% or more, 55% or more, 60% or more, 65% or more, 70% or more, 75% or more, or 80% or more of the indels in the plurality of modified cells as a whole are deletions of 4 to 25 base pairs.

[0026] In certain embodiments of the first populations of modified cells provided herein, 50% or more, 55% or more, 60% or more, 65% or more, 70% or more, or 72% or more of the indels in the plurality of modified cells as a whole are deletions of 5 to 25 base pairs.

[0027] In certain embodiments of the first populations of modified cells provided herein, the modified cells are produced by delivering a first RNP complex including a first gRNA comprising a first gRNA targeting domain and a Cpf1 RNA-guided nuclease or a modified Cpf1 RNA-guided nuclease to a first population of unmodified cells comprising a plurality of unmodified CD34+ or hematopoietic stem cells to generate indels. In certain of these embodiments, the first RNP complex is delivered to the first population of unmodified cells by electroporation. In certain embodiments, the first population of unmodified cells is from a subject having sickle cell disease. In certain embodiments, the first gRNA includes a 5′ end and a 3′ end, with a DNA extension at the 5′ end and a 2′-O-methyl-3′-phosphorothioate modification at the 3′ end. In certain of these embodiments, the DNA extension at the 5′ end comprises a sequence set forth in any of SEQ ID NOs:1235-1250. In certain embodiments, the first gRNA targeting domain comprises the sequence set forth in SEQ ID NO:1254. In certain embodiments, the first gRNA comprises the sequence set forth in SEQ ID NO:1051. In certain embodiments, the modified Cpf1 RNA-guided nuclease comprises the sequence set forth in SEQ ID NO:1097. In certain embodiments, the first population of modified cells has higher fetal hemoglobin (HbF) levels than the first population of unmodified cells.

[0028] In certain embodiments of the first populations of modified cells provided herein, one or more of the cells in the plurality of modified cells include (a) a HBG1/2 c.-104 to -121 deletion in a HBG1 promoter, an HBG2 promoter, or both; (b) a HBG1/2 c.-110 to -115 deletion in a HBG1 promoter, an HBG2 promoter, or both; (c) a HBG1/2 c.-112 to -115 deletion in a HBG1 promoter, an HBG2 promoter, or both; (d) a HBG1/2 c.-113 to -115 deletion in a HBG1 promoter, an HBG2 promoter, or both; (e) a HBG1/2 c.-111 to -115 deletion in a HBG1 promoter, an HBG2 promoter, or both; (f) a HBG1/2 c.-111 to -117 deletion in a HBG1 promoter, an HBG2 promoter, or both; (g) a HBG1/2 c.-102 to -114 deletion in a HBG1 promoter, an HBG2 promoter, or both; (h) a HBG1/2 c.-114 to -118 deletion in a HBG1 promoter, an HBG2 promoter, or both; (i) a HBG1/2 c.-112 to -116 deletion in a HBG1 promoter, an HBG2 promoter, or both; or (j) a HBG1/2 c.-113 to -117 deletion in a HBG1 promoter, an HBG2 promoter, or both.

[0029] In certain embodiments of the first populations of modified cells provided herein, the plurality of modified cells as a whole includes (a) a HBG1/2 c.-104 to -121 deletion in a HBG1 promoter, an HBG2 promoter, or both and (b) a HBG1/2 c.-110 to -115 deletion in a HBG1 promoter, an HBG2 promoter, or both. In certain embodiments, HBG1/2 c.-104 to -121 deletions make up 1% or more, 1.5% or more, 2% or more, 2.5% or more. 3% or more, 3.5% or more, 4% or more, 4.5% or more, 5% or more, 5.5% or more, 6% or more, 6.5% or more, 7% or more, 7.5% or more, 8% or more, 8.5% or more, 9% or more, 9.5% or more, 10% or more, 10.5% or more, 11% or more, 11.5% or more, 12% or more, 12.5% or more, 13% or more, 13.5% or more, 14% or more, 14.5% or more, or 15% or more of the indels in the plurality of modified cells as a whole. In certain embodiments, HBG1/2 c.-104 to -121 deletions make up 1% to 15.5% of the indels in the plurality of modified cells as a whole. In certain embodiments, HBG1/2 c.-110 to -115 deletions make up 0.5% or more, 1% or more, 1.5% or more, 2% or more, 2.5% or more. 3% or more, 3.5% or more, 4% or more, 4.5% or more, 5% or more, or 5.5% or more of the indels in the plurality of modified cells as a whole. In certain embodiments, HBG1/2 c.-110 to -115 deletions make up 0.5% to 6% of the indels in the plurality of modified cells as a whole.

[0030] In certain embodiments of the first populations of modified cells provided herein, the plurality of modified cells as a whole include (α) a HBG1/2 c.-104 to -121 deletion in a HBG1 promoter, an HBG2 promoter, or both; (b) a HBG1/2 c.-110 to -115 deletion in a HBG1 promoter, an HBG2 promoter, or both; (c) a HBG1/2 c.-112 to -115 deletion in a HBG1 promoter, an HBG2 promoter, or both; (d) a HBG1/2 c.-113 to -115 deletion in a HBG1 promoter, an HBG2 promoter, or both; (e) a HBG1/2 c.-111 to -115 deletion in a HBG1 promoter, an HBG2 promoter, or both; (f) a HBG1/2 c.-111 to -117 deletion in a HBG1 promoter, an HBG2 promoter, or both; (g) a HBG1/2 c.-102 to -114 deletion in a HBG1 promoter, an HBG2 promoter, or both; (h) a HBG1/2 c.-114 to -118 deletion in a HBG1 promoter, an HBG2 promoter, or both; (i) a HBG1/2 c.-112 to -116 deletion in a HBG1 promoter, an HBG2 promoter, or both; and (j) a HBG1/2 c.-113 to -117 deletion in a HBG1 promoter, an HBG2 promoter, or both. In certain embodiments, the HBG1/2 c.-104 to -121 deletions make up 1% or more, 1.5% or more, 2% or more, 2.5% or more. 3% or more, 3.5% or more, 4% or more, 4.5% or more, 5% or more, 5.5% or more, 6% or more, 6.5% or more, 7% or more, 7.5% or more, 8% or more, 8.5% or more, 9% or more, 9.5% or more, 10% or more, 10.5% or more, 11% or more, 11.5% or more, 12% or more, 12.5% or more, 13% or more, 13.5% or more, 14% or more, 14.5% or more, or 15% or more of the indels in the plurality of modified cells as a whole. In certain embodiments, the HBG1/2 c.-104 to -121 deletions make up 1% to 15.5% of the indels in the plurality of modified cells as a whole. In certain embodiments, the HBG1/2 c.-110 to -115 deletions make up 0.5% or more, 1% or more, 1.5% or more, 2% or more, 2.5% or more. 3% or more, 3.5% or more, 4% or more, 4.5% or more, 5% or more, or 5.5% or more of the indels in the plurality of modified cells as a whole. In certain embodiments, HBG1/2 c.-110 to -115 deletions make up 0.5% to 6% of the indels in the plurality of modified cells as a whole. In certain embodiments, the HBG1/2 c.-112 to -115 deletions make up 0.5% or more, 1% or more, 1.5% or more, 2% or more, 2.5% or more. 3% or more, 3.5% or more, 4% or more, 4.5% or more, 5% or more, or 5.5% or more of the indels in the plurality of modified cells as a whole. In certain embodiments, HBG1/2 c.-112 to -115 deletions make up 0.5% to 6% of the indels in the plurality of modified cells as a whole. In certain embodiments, the HBG1/2 c.-113 to -115 deletions make up 0.5% or more, 1% or more, 1.5% or more, 2% or more, 2.5% or more. 3% or more, 3.5% or more, 4% or more, 4.5% or more, 5% or more, or 5.5% or more of the indels in the plurality of modified cells as a whole. In certain embodiments, HBG1/2 c.-113 to -115 deletions make up 0.5% to 6% of the indels in the plurality of modified cells as a whole. In certain embodiments, the HBG1/2 c.-111 to -115 deletions make up 0.5% or more, 1% or more, 1.5% or more, 2% or more, 2.5% or more. 3% or more, 3.5% or more, 4% or more, 4.5% or more, 5% or more, or 5.5% or more of the indels in the plurality of modified cells as a whole. In certain embodiments, HBG1/2 c.-111 to -115 deletions make up 0.5% to 6% of the indels in the plurality of modified cells as a whole. In certain embodiments, the HBG1/2 c.-111 to -117 deletions make up 0.5% or more, 1% or more, 1.5% or more, 2% or more, 2.5% or more. 3% or more, 3.5% or more, 4% or more, 4.5% or more, 5% or more, or 5.5% or more of the indels in the plurality of modified cells as a whole. In certain embodiments, HBG1/2 c.-111 to -117 deletions make up 0.5% to 6% of the indels in the plurality of modified cells as a whole. In certain embodiments, the HBG1/2 c.-102 to -114 deletions make up 0.5% or more, 1% or more, 1.5% or more, 2% or more, 2.5% or more. 3% or more, 3.5% or more, 4% or more, 4.5% or more, 5% or more, or 5.5% or more of the indels in the plurality of modified cells as a whole. In certain embodiments, HBG1/2 c.-102 to -114 deletions make up 0.5% to 6% of the indels in the plurality of modified cells as a whole. In certain embodiments, the HBG1/2 c.-114 to -118 deletions make up 0.5% or more, 1% or more, 1.5% or more, 2% or more, 2.5% or more. 3% or more, 3.5% or more, 4% or more, 4.5% or more, 5% or more, or 5.5% or more of the indels in the plurality of modified cells as a whole. In certain embodiments, HBG1/2 c.-114 to -118 deletions make up 0.5% to 6% of the indels in the plurality of modified cells as a whole. In certain embodiments, the HBG1/2 c.-112 to -116 deletions make up 0.5% or more, 1% or more, 1.5% or more, 2% or more, 2.5% or more. 3% or more, 3.5% or more, 4% or more, 4.5% or more, 5% or more, or 5.5% or more of the indels in the plurality of modified cells as a whole. In certain embodiments, HBG1/2 c.-112 to -116 deletions make up 0.5% to 6% of the indels in the plurality of modified cells as a whole. In certain embodiments, the HBG1/2 c.-113 to -117 deletions make up 0.5% or more, 1% or more, 1.5% or more, 2% or more, 2.5% or more. 3% or more, 3.5% or more, 4% or more, 4.5% or more, 5% or more, or 5.5% or more of the indels in the plurality of modified cells as a whole. In certain embodiments, HBG1/2 c.-113 to -117 deletions make up 0.5% to 6% of the indels in the plurality of modified cells as a whole.

[0031] In certain embodiments of the first populations of modified cells provided herein, the plurality of modified cells as a whole includes the 108 deletions present in all 14 samples in Table 32.

[0032] In certain embodiments of the first populations of modified cells provided herein, the plurality of modified cells as a whole includes the indels identified as having an “Ave % in Indel” of 0.1% or more in Table 32. In certain of these embodiments, the plurality of modified cells as a whole includes all of the indels in Table 32.

[0033] In certain embodiments of the first populations of modified cells provided herein, the plurality of modified cells as a whole include at least 10% more deletions of at least 4 base pairs than a second population of modified cells comprising a plurality of modified CD34+ or hematopoietic stem cells comprising a plurality of modified CD34+ or hematopoietic stem cells with one or more indels in an HBG gene promoter, where the indels of the second population of modified cells are generated by delivering a second RNP complex including a second gRNA having a gRNA targeting domain comprising SEQ ID NO:339 and a Cas9 RNA-guided nuclease to a second population of unmodified cells comprising a plurality of unmodified CD34+ or hematopoietic stem cells. In certain of these embodiments, the second RNP complex is delivered to the second population of unmodified cells by electroporation. In certain embodiments, the second population of unmodified cells is from a subject having sickle cell disease. In certain embodiments, the first population of modified cells has higher HbF levels than the second population of modified cells. In certain of these embodiments, the plurality of modified cells in the second population include an indel in a CCAAT box target region.

[0034] Provided herein in certain embodiments are methods of inducing expression of HbF in a first population of modified cells comprising a plurality of modified CD34+ or hematopoietic stem cells with one or more indels in an HBG gene promoter, the method comprising delivering a first RNP complex including a first gRNA comprising a first gRNA targeting domain and a Cpf1 RNA-guided nuclease or a modified Cpf1 RNA-guided nuclease to a first population of unmodified cells comprising a plurality of unmodified CD34+ or hematopoietic stem cells to generate indels. In certain embodiments, 60% or more, 65% or more, 70% or more, 75% or more, 80% or more, 85% or more, 90% or more, or 95% or more of the resultant indels in the plurality of modified cells as a whole are deletions of at least 4 base pairs. In certain embodiments, the first population of modified cells exhibits increased HbF levels versus the first population of unmodified cells. In certain embodiments, the first RNP complex is delivered to the first population of unmodified cells by electroporation.

[0035] Provided herein in certain embodiments are methods of decreasing sickling in a first population of red blood cells (RBCs) cultured from a first population of modified cells comprising a plurality of modified CD34+ cells with one or more indels in an HBG gene promoter, the method comprising delivering a first RNP complex including a first gRNA comprising a first gRNA targeting domain and a Cpf1 RNA-guided nuclease or a modified Cpf1 RNA-guided nuclease to a first population of unmodified cells comprising a plurality of unmodified CD34+ cells to generate indels, then culturing the first population of RBCs from the first population of modified cells. In certain embodiments, 60% or more, 65% or more, 70% or more, 75% or more, 80% or more, 85% or more, 90% or more, or 95% or more of the resultant indels in the plurality of modified cells as a whole are deletions of at least 4 base pairs. In certain embodiments, the first population of RBCs exhibits significantly decreased sickling upon deoxygenation versus a second population of RBCs cultured from the first population of unmodified cells. In certain embodiments, the first population of RBCs sickle at a significantly lower oxygen tension, for example as measured by relative oxygen pressure, than the second population of RBCs. In certain embodiments, the first population of RBCs has a significantly higher minimum elongation index upon deoxygenation than the second population of RBCs. In certain embodiments, the first population of RBCs has a significantly higher velocity upon deoxygenation than the second population of RBCs. In certain embodiments, the first population of RBCs has higher HbF levels than the second population of RBCs.

[0036] Provided herein in certain embodiments are methods of alleviating one or more symptoms of sickle cell disease in a subject in need thereof comprising delivering a first RNP complex including a first gRNA comprising a first targeting domain and a Cpf1 RNA-guided nuclease or a modified Cpf1 RNA-guided nuclease to a first population of unmodified cells comprising a plurality of unmodified CD34+ or hematopoietic stem cells to generate a first population of modified cells comprising a plurality of modified CD34+ or hematopoietic stem cells comprising one or more indels in an HBG gene promoter, and then administering the resultant first population of modified cells to the subject to alleviate one or more symptoms of sickle cell disease. In certain embodiments, 60% or more, 65% or more, 70% or more, 75% or more, 80% or more, 85% or more, 90% or more, or 95% or more of the resultant indels in the resultant plurality of modified CD34+ or hematopoietic stem cells as a whole are deletions of at least 4 base pairs. In certain embodiments, the methods further comprise detecting a population of modified erythroid progeny cells comprising a plurality of modified erythroid progeny cells cultured from the first population of modified cells at about 1 week, 2 weeks, 3 weeks, 4 weeks, 5 weeks, 6 weeks, 7 weeks, 8 weeks, 10 weeks, 12 weeks. 16 weeks, 20 weeks, 1 month, 2 months, 3 months, 4 months, 5 months, 6 months, 8 months, 12 months, 1 year, 2 years, 3 years, 4 years, 5 years, or more than 5 years after administration. In certain embodiments, the cultured cells may include bone marrow (BM)-engrafted CD34+ hematopoietic stem cells or blood cells derived therefrom, e.g., myeloid progenitor or differentiated myeloid cells, e.g., erythrocytes, mast cells, myoblasts; or lymphoid progenitors or differentiated lymphoid cells, e.g., T- or B-lymphocytes or NK cells. In certain embodiments, the method results in long-term engraftment of a plurality of HSC clones in bone marrow, e.g., at least 1 week, 2 weeks, 3 weeks, 4 weeks, 5 weeks, 6 weeks, 7 weeks, 8 weeks, 10 weeks, 12 weeks. 16 weeks, 20 weeks, 1 month, 2 months, 3 months, 4 months, 5 months, 6 months, 8 months, 12 months, 1 year, 2 years, 3 years, 4 years, 5 years, or more than 5 years after administration. In certain embodiments the method results in long-term expression of at least 50%, at least 60%, at least 70%, at least 80%, at least 90%, at least 95%, or at least 99% of total hemoglobin as compared to a healthy subject. In certain embodiments, the method results in a reconstitution of all hematopoietic cell lineages, e.g., without any differentiation bias, e.g., without an erythroid lineage differentiation bias.

[0037] Provided herein in certain embodiments is a population of cells comprising a plurality of red blood cells (RBCs) cultured from a plurality of modified CD34+ cells from a subject having sickle cell disease, each modified cell comprising an indel in an HBG gene promoter. In certain embodiments, the plurality of modified cells as a whole includes the 108 deletions present in all 14 samples in FIG. 56A. In certain embodiments, the population of cells is generated by delivering an RNP complex including a gRNA comprising a first targeting domain and a Cpf1 RNA-guided nuclease or a modified Cpf1 RNA-guided nuclease to a plurality of unmodified CD34+ cells from a subject having sickle cell disease to generate the indels; and culturing the RBCs from the plurality of modified CD34+ cells.

[0038] Provided herein in certain embodiments is a population of cells comprising a plurality of red blood cells (RBCs) cultured from a plurality of modified CD34+ cells from a subject having sickle cell disease, each modified cell comprising an indel in an HBG gene promoter. In certain embodiments, 60% or more, 65% or more, 70% or more, 75% or more, 80% or more, 85% or more, 90% or more, or 95% or more of the indels in the HBG gene promoter are deletions of at least 4 base pairs. In certain embodiments, the population of cells is generated by delivering an RNP complex including a gRNA comprising a first targeting domain and a Cpf1 RNA-guided nuclease or a modified Cpf1 RNA-guided nuclease to a plurality of unmodified CD34+ cells from a subject having sickle cell disease to generate the indels; and culturing the RBCs from the plurality of modified CD34+ cells.

[0039] In certain embodiments of the population of cells comprising a plurality of RBCs provided herein, the plurality of RBCs sickle at a significantly lower oxygen tension, e.g., as measured by relative oxygen pressure, than a population of RBCs cultured from unmodified CD34+ cells, of the subject having sickle cell disease, have a significantly higher minimum elongation index upon deoxygenation than a population of RBCs cultured from unmodified CD34+ cells of the subject having sickle cell disease, and/or have a significantly higher velocity upon deoxygenation than a population of RBCs cultured from unmodified CD34+ cells of the subject having sickle cell disease.

[0040] Provided herein are genome editing systems, ribonucleoprotein (RNP) complexes, guide RNAs, Cpf1 proteins, including modified Cpf1 proteins (Cpf1 variants), and CRISPR-mediated methods for altering the promoter region of one or more γ-globin genes (e.g., HBG1, HBG2, or HBG1 and HBG2) and increasing expression of fetal hemoglobin (HbF). In certain embodiments, an RNP complex may include a guide RNA (gRNA) complexed to a wild-type Cpf1 or modified Cpf1 RNA-guided nuclease (modified Cpf1 protein). In certain embodiments, a gRNA may comprise a sequence set forth in Table 13, Table 18, or Table 19. In certain embodiments, a gRNA may comprise a gRNA targeting domain. In certain embodiments, a gRNA targeting domain may comprise a sequence selected from the group consisting of SEQ ID NOs:1002, 1254, 1258, 1260, 1262, and 1264. In certain embodiments, a gRNA may comprise a gRNA sequence set forth in Table 19. In certain embodiments, a gRNA may comprise a sequence selected from the group consisting of SEQ ID NOs:1022, 1023, 1041-1105. In certain embodiments, the RNP complex may comprise an RNP complex set forth in Table 21. For example, an RNP complex may include a gRNA comprising the sequence set forth in SEQ ID NO:1051 and a modified Cpf1 protein encoded by the sequence set forth in SEQ ID NO:1097 (RNP32, Table 21).

[0041] The inventors have discovered herein that delivery of an RNP complex including a gRNA complexed to a modified Cpf1 protein may result in increased editing of a target nucleic acid. In certain embodiments, the modified Cpf1 protein may contain one or more modifications. In certain embodiments, the one or more modifications may include, without limitation, one or more mutations in a wild-type Cpf1 amino acid sequence, one or more mutations in a wild-type Cpf1 nucleic acid sequence, one or more nuclear localization signals (NLS), one or more purification tags (e.g., His tag), or a combination thereof. In certain embodiments, a modified Cpf1 may be encoded by a sequence set forth in SEQ ID NOs:1000, 1001, 1008-1018, 1032, 1035-39, 1094-1097, 1107-09 (Cpf1 polypeptide sequences) or SEQ ID NOs:1019-1021, 1110-17 (Cpf1 polynucleotide sequences). In certain embodiments, the gRNA may be a modified or unmodified gRNA. In certain embodiments, the gRNA may comprise a sequence set forth in Table 13, Table 18, or Table 19. In certain embodiments, the RNP complex may comprise an RNP complex set forth in Table 21. For example, the RNP complex may include a gRNA comprising the sequence set forth in SEQ ID NO:1051 and a modified Cpf1 protein encoded by the sequence set forth in SEQ ID NO:1097 (RNP32, Table 21). In certain embodiments, an RNP complex comprising a modified Cpf1 protein may increase editing of a target nucleic acid. In certain embodiments, an RNP complex comprising a modified Cpf1 protein may increase editing resulting in an increase of productive indels. In various embodiments, an increase in editing of the target nucleic acid may be assessed by any means known to skilled artisans, such as, but not limited to, PCR amplification of the target nucleic acid and subsequent sequencing analysis (e.g., Sanger sequencing, next generation sequencing).

[0042] The inventors have also discovered herein that delivery of an RNP complex including a modified gRNA complexed to an unmodified or modified Cpf1 protein may result in increased editing of a target nucleic acid. In certain embodiments, the modified gRNA may comprise one or more modifications including a phosphorothioate linkage modification, a phosphorodithioate (PS2) linkage modification, a 2′-O-methyl modification, one or more or a stretch of deoxyribonucleic acid (DNA) bases (also referred to herein as a “DNA extension”), one or more or a stretch of ribonucleic acid (RNA) bases (also referred to herein as a “RNA extension”), or combinations thereof. In certain embodiments, the DNA extension may comprise a sequence set forth in Table 24. For example, in certain embodiments, the DNA extension may comprise a sequence set forth in SEQ ID NOs:1235-1250. In certain embodiments, the RNA extension may comprise a sequence set forth in Table 24. For example, in certain embodiments, the RNA extension may comprise a sequence set forth in SEQ ID NOs:1231-1234, 1251-1253. In certain embodiments, the gRNA may comprise a sequence set forth in Table 13, Table 18, or Table 19. In certain embodiments, the RNP complex may comprise an RNP complex set forth in Table 21. For example, the RNP complex may include a gRNA comprising the sequence set forth in SEQ ID NO:1051 and a modified Cpf1 protein encoded by the sequence set forth in SEQ ID NO:1097 (RNP32, Table 21). In certain embodiments, an RNP complex comprising a modified gRNA may increase editing of a target nucleic acid. In certain embodiments, an RNP complex comprising a modified gRNA may increase editing resulting in an increase of productive indels.

[0043] In certain embodiments, an RNP complex comprising a modified gRNA and a modified Cpf1 protein may increase editing of a target nucleic acid. In certain embodiments, an RNP complex comprising a modified gRNA and a modified Cpf1 protein may increase editing resulting in an increase of productive indels.

[0044] The inventors have also discovered that codelivery of an RNP complex comprising a gRNA complexed to a Cpf1 molecule (e.g., “gRNA-Cpf1-RNP”) with a “booster element” may result in increased editing of a target nucleic acid. In certain embodiments, the RNP complex may comprise an RNP complex set forth in Table 21. For example, the RNP complex may include a gRNA comprising the sequence set forth in SEQ ID NO:1051 and a modified Cpf1 protein encoded by the sequence set forth in SEQ ID NO:1097 (RNP32, Table 21). As used herein, the term “booster element” refers to an element which, when co-delivered with a RNP complex comprising a gRNA complexed to an RNA-guided nuclease (“gRNA-nuclease-RNP”), increases editing of a target nucleic acid compared with editing of the target nucleic acid without the booster element. In certain embodiments, one or more booster elements may be codelivered with a gRNA-nuclease-RNP complex to increase editing of a target nucleic acid. In certain embodiments, codelivery of a booster element may increase editing resulting in an increase of productive indels. In various embodiments, an increase in editing of the target nucleic acid may be assessed by any means known to skilled artisans, such as, but not limited to, PCR amplification of the target nucleic acid and subsequent sequencing analysis (e.g., Sanger sequencing, next generation sequencing).

[0045] In certain embodiments, a gRNA-nuclease-RNP may comprise a gRNA-Cpf1-RNP. In certain embodiments, a Cpf1 molecule of the gRNA-Cpf1-RNP complex may be a wild-type Cpf1 or modified Cpf1. In certain embodiments, the Cpf1 molecule of the gRNA-Cpf1-RNP may be encoded by a sequence set forth in SEQ ID NOs:1000, 1001, 1008-1018, 1032, 1035-39, 1094-1097, 1107-09 (Cpf1 polypeptide sequences) or SEQ ID NOs:1019-1021, 1110-17 (Cpf1 polynucleotide sequences). In certain embodiments, the gRNA-Cpf1-RNP complex may comprise a gRNA comprising a targeting domain set forth in Table 13 or Table 18. In certain embodiments, the gRNA-Cpf1-RNP complex may comprise a gRNA comprising a sequence set forth in Table 19. In certain embodiments, the gRNA may be a modified or unmodified gRNA.

[0046] In certain embodiments, a booster element may comprise a dead RNP comprising a dead gRNA molecule complexed with an RNA-guided nuclease molecule (“dead gRNA-nuclease-RNP”). In certain embodiments, the dead gRNA-nuclease-RNP may comprise a dead gRNA complexed with a wild-type (WT) Cas9 molecule (“dead gRNA-Cas9-RNP”), a dead gRNA complexed with a Cas9 nickase molecule (“dead gRNA-nickase-RNP”) or a dead gRNA complexed with an enzymatically inactive (ei) Cas9 molecule (“dead gRNA-eiCas9-RNP”). In certain embodiments, the dead gRNA-nuclease-RNP complex may have decreased activity or lack nuclease activity. In certain embodiments, the dead gRNA of the dead gRNA-nuclease-RNP complex may comprise any of the dead gRNAs set forth herein. For example, the dead gRNA may comprise a targeting domain may be the same as or may differ by no more than 3 nucleotides from a dead gRNA targeting domain set forth in Table 10 or Table 15. In certain embodiments, the dead gRNA may include a targeting domain comprising a truncation of a gRNA targeting domain. In certain embodiments, the gRNA targeting domain to be truncated may be a gRNA targeting domain set forth in Table 2, Table 10, or Table 15. In certain embodiments, the dead gRNA may be a modified or unmodified dead gRNA. As shown herein, codelivery of a gRNA-Cpf1-RNP with a dead gRNA-Cas9-RNP (i.e., an RNP comprising a dead gRNA complexed to a WT Cas9) or codelivery of a gRNA-Cpf1-RNP with a dead gRNA-nickase-RNP (i.e., an RNP comprising a dead gRNA complexed to a Cas9 nickase (i.e., the Cas9 D10A nickase)) resulted in an increase in total editing above levels observed following delivery of gRNA-Cpf1-RNP alone (see, e.g., Examples, 15, 17, 18). Dead gRNA molecules may comprise targeting domains complementary to regions proximal to or within a target region (e.g., the CCAAT box target region, 13 nt target region, proximal HBG1/2 promoter target sequence, and/or the GATA1 binding motif in BCL11Ae) in a target nucleic acid. In certain embodiments, “proximal to” may denote the region within 10, 25, 50, 100, or 200 nucleotides of a target region (e.g., the CCAAT box target region, 13 nt target region, proximal HBG1/2 promoter target sequence, and/or the GATA1 binding motif in BCL11Ae). In certain embodiments, one or more booster elements may be comprised of one or more dead gRNA-nuclease-RNPs, e.g., dead gRNA-Cas9-RNP, dead gRNA-nickase-RNP, dead gRNA-eiCas9-RNP, to be codelivered with a gRNA-Cpf1-RNP. In certain embodiments, codelivery of a dead gRNA-nuclease-RNP does not alter the indel profile of a gRNA-Cpf1-RNP.

[0047] In certain embodiments, a booster element may comprise an RNP complex comprising a gRNA molecule complexed with an RNA-guided nuclease nickase molecule (“gRNA-nickase-RNP”). In certain embodiments, the RNA-guided nuclease nickase molecule may be a Cas9 nickase molecule, e.g., Cas9 D10A nickase. In certain embodiments, the gRNA of the gRNA-nickase-RNP may comprise any of the gRNAs set forth herein. For example, the gRNA may comprise a gRNA targeting domain set forth in Table 2, Table 10, or Table 15. In certain embodiments, the gRNA may be a modified or unmodified gRNA. As shown herein, codelivery of gRNA-Cpf1-RNP with a gRNA-nickase-RNP complex (RNP comprising a guide RNA complexed to a Cas9D10A nickase molecule) resulted in an increase in total editing above levels observed following delivery of gRNA-Cpf1-RNP alone (see, e.g., Examples 15, 16). Additionally, codelivery of a gRNA-nickase-RNP complex with a gRNA-Cpf1-RNP complex altered the directionality, length, and/or position of the indel profile of gRNA-Cpf1-RNP. In certain embodiments, a booster enhancer may be used to provide a desired editing outcome, for example, to increase the rate of productive indels. In certain embodiments, codelivery of a gRNA-nickase-RNP complex with a gRNA-Cpf1-RNP complex may alter the indel profile of the gRNA-Cpf1-RNP.

[0048] In certain embodiments, a booster element may comprise a single stranded oligodeoxynucleotide (ssODN) or a double stranded oligodeoxynucleotide (dsODN). In certain embodiments, the ssODN may be any ssODN disclosed herein. In certain embodiments, an ssODN may comprise a sequence set forth in Table 11. For example, in certain embodiments, an ssODN may comprise the sequence set forth in SEQ ID NO:1040.

[0049] In one aspect, the disclosure relates to an RNP complex comprising a CRISPR from Prevotella and Franciscella 1 (Cpf1) RNA-guided nuclease or a variant thereof and a gRNA, wherein the gRNA is capable of binding to a target site in a promoter of an HBG gene in a cell. In certain embodiments, the gRNA may be modified or unmodified. In certain embodiments, the gRNA may comprise one or more modifications including a phosphorothioate linkage modification, a phosphorodithioate (PS2) linkage modification, a 2′-O-methyl modification, a DNA extension, an RNA extension, or combinations thereof. In certain embodiments, the DNA extension may comprise a sequence set forth in Table 24. In certain embodiments, the RNA extension may comprise a sequence set forth in Table 24. In certain embodiments, the gRNA may comprise a sequence set forth in Table 13, Table 18, or Table 19. In certain embodiments, the RNP complex may comprise an RNP complex set forth in Table 21. For example, the RNP complex may include a gRNA comprising the sequence set forth in SEQ ID NO:1051 and a Cpf1 variant protein encoded by the sequence set forth in SEQ ID NO:1097 (RNP32, Table 21). In certain embodiments, the Cpf1 variant protein may contain one or more modifications. In certain embodiments, the one or more modifications may include, without limitation, one or more mutations in a wild-type Cpf1 amino acid sequence, one or more mutations in a wild-type Cpf1 nucleic acid sequence, one or more nuclear localization signals (NLS), one or more purification tags (e.g., His tag), or a combination thereof. In certain embodiments, a Cpf1 variant protein may be encoded by a sequence set forth in SEQ ID NOs:1000, 1001, 1008-1018, 1032, 1035-39, 1094-1097, 1107-09 (Cpf1 polypeptide sequences) or SEQ ID NOs:1019-1021, 1110-17 (Cpf1 polynucleotide sequences).

[0050] In one aspect, the disclosure relates to a method of altering a promoter of an HBG gene in a cell comprising contacting the cell with an RNP complex disclosed herein. In certain embodiments, the alteration may comprise an indel within one or more regions set forth in Table 17. In certain embodiments, the alteration may comprise an indel within a CCAAT box target region of the promoter of an HBG gene. For example, in certain embodiments, the alteration may comprise an indel within Chr 11 (NC_000011.10): 5,249,955-5,249,987 (Table 17, Region 6), Chr 11 (NC_000011.10): 5,254,879-5,254,909 (Table 17, Region 16), or a combination thereof. In certain embodiments, the RNP complex may comprise a gRNA and a Cpf1 protein. In certain embodiments, the gRNA may comprise an RNA targeting domain set forth in Table 19. In certain embodiments, the gRNA targeting domain may comprise a sequence selected from the group consisting of SEQ ID NOs:1002, 1254, 1258, 1260, 1262, and 1264. In certain embodiments, the gRNA may comprise a gRNA sequence set forth in Table 19. In certain embodiments, the gRNA may comprise a sequence selected from the group consisting of SEQ ID NOs:1022, 1023, 1041-1105. In certain embodiments, a gRNA may be configured to provide an editing event at Chr11:5249973, Chr11:5249977 (HBG1); Chr11:5250042, Chr11:5250046 (HBG1); Chr11:5250055, Chr11:5250059 (HBG1); Chr11:5250179, Chr11:5250183 (HBG1); Chr11:5254897, Chr11:5254901 (HBG2); Chr11:5254897, Chr11:5254901 (HBG2); Chr11:5254966, 5254970 (HBG2); Chr11:5254979, 5254983 (HBG2) (Table 22, Table 23). In certain embodiments, the cell may be further contacted with a booster element. In certain embodiment, a booster element may comprise a single stranded oligodeoxynucleotide (ssODN) or a double stranded oligodeoxynucleotide (dsODN). In certain embodiments, the ssODN may be any ssODN disclosed herein. In certain embodiments, an ssODN may comprise a sequence set forth in Table 11. For example, in certain embodiments, an ssODN may comprise the sequence set forth in SEQ ID NO:1040.

[0051] In one aspect, the disclosure relates to an isolated cell comprising an alteration in a promoter of HBG gene generated by the delivery of an RNP complex to the cell. In certain embodiments, the RNP complex may comprise a gRNA and a Cpf1 protein. In certain embodiments, the gRNA may be modified or unmodified. In certain embodiments, the gRNA may comprise one or more modifications including a phosphorothioate linkage modification, a phosphorodithioate (PS2) linkage modification, a 2′-O-methyl modification, a DNA extension, an RNA extension, or combinations thereof. In certain embodiments, the DNA extension may comprise a sequence set forth in Table 24. In certain embodiments, the RNA extension may comprise a sequence set forth in Table 24. In certain embodiments, the gRNA may comprise a sequence set forth in Table 13, Table 18, or Table 19. In certain embodiments, the RNP complex may comprise an RNP complex set forth in Table 21. For example, the RNP complex may include a gRNA comprising the sequence set forth in SEQ ID NO:1051 and a Cpf1 variant protein encoded by the sequence set forth in SEQ ID NO:1097 (RNP32, Table 21). In certain embodiments, the Cpf1 variant protein may contain one or more modifications. In certain embodiments, the one or more modifications may include, without limitation, one or more mutations in a wild-type Cpf1 amino acid sequence, one or more mutations in a wild-type Cpf1 nucleic acid sequence, one or more nuclear localization signals (NLS), one or more purification tags (e.g., His tag), or a combination thereof. In certain embodiments, a Cpf1 variant protein may be encoded by a sequence set forth in SEQ ID NOs:1000, 1001, 1008-1018, 1032, 1035-39, 1094-1097, 1107-09 (Cpf1 polypeptide sequences) or SEQ ID NOs:1019-1021, 1110-17 (Cpf1 polynucleotide sequences). In certain embodiments, a booster element may be co-delivered with the RNP complex. In certain embodiment, a booster element may comprise a single stranded oligodeoxynucleotide (ssODN) or a double stranded oligodeoxynucleotide (dsODN). In certain embodiments, the ssODN may be any ssODN disclosed herein. In certain embodiments, an ssODN may comprise a sequence set forth in Table 11. For example, in certain embodiments, an ssODN may comprise the sequence set forth in SEQ ID NO:1040.

[0052] In one aspect, the disclosure relates to an ex vivo method of increasing the level of fetal hemoglobin (HbF) in a human cell by genome editing using an RNP complex comprising a gRNA and a Cpf1 RNA-guided nuclease or a variant thereof to affect an alteration in a promoter of an HBG gene, thereby to increase expression of HbF. In certain embodiments, the gRNA may be modified or unmodified. In certain embodiments, the gRNA may comprise one or more modifications including a phosphorothioate linkage modification, a phosphorodithioate (PS2) linkage modification, a 2′-O-methyl modification, a DNA extension, an RNA extension, or combinations thereof. In certain embodiments, the DNA extension may comprise a sequence set forth in Table 24. In certain embodiments, the RNA extension may comprise a sequence set forth in Table 24. In certain embodiments, the gRNA may comprise a sequence set forth in Table 13, Table 18, or Table 19. In certain embodiments, the RNP complex may comprise an RNP complex set forth in Table 21. For example, the RNP complex may include a gRNA comprising the sequence set forth in SEQ ID NO:1051 and a Cpf1 variant protein encoded by the sequence set forth in SEQ ID NO:1097 (RNP32, Table 21). In certain embodiments, the Cpf1 variant protein may contain one or more modifications. In certain embodiments, the one or more modifications may include, without limitation, one or more mutations in a wild-type Cpf1 amino acid sequence, one or more mutations in a wild-type Cpf1 nucleic acid sequence, one or more nuclear localization signals (NLS), one or more purification tags (e.g., His tag), or a combination thereof. In certain embodiments, a Cpf1 variant protein may be encoded by a sequence set forth in SEQ ID NOs:1000, 1001, 1008-1018, 1032, 1035-39, 1094-1097, 1107-09 (Cpf1 polypeptide sequences) or SEQ ID NOs:1019-1021, 1110-17 (Cpf1 polynucleotide sequences). In certain embodiments, a booster element may be co-delivered with the RNP complex. In certain embodiment, a booster element may comprise a single stranded oligodeoxynucleotide (ssODN) or a double stranded oligodeoxynucleotide (dsODN). In certain embodiments, the ssODN may be any ssODN disclosed herein. In certain embodiments, an ssODN may comprise a sequence set forth in Table 11. For example, in certain embodiments, an ssODN may comprise the sequence set forth in SEQ ID NO:1040.

[0053] In one aspect, the disclosure relates to a population of CD34+ or hematopoietic stem cells, wherein one or more cells in the population comprises an alteration in a promoter of an HBG gene, which alteration is generated by delivering an RNP complex comprising a gRNA and a Cpf1 RNA-guided nuclease or a variant thereof to the population of CD34+ or hematopoietic stem cells. In certain embodiments, the gRNA may be modified or unmodified. In certain embodiments, the gRNA may comprise one or more modifications including a phosphorothioate linkage modification, a phosphorodithioate (PS2) linkage modification, a 2′-O-methyl modification, a DNA extension, an RNA extension, or combinations thereof. In certain embodiments, the DNA extension may comprise a sequence set forth in Table 24. In certain embodiments, the RNA extension may comprise a sequence set forth in Table 24. In certain embodiments, the gRNA may comprise a sequence set forth in Table 13, Table 18, or Table 19. In certain embodiments, the RNP complex may comprise an RNP complex set forth in Table 21. For example, the RNP complex may include a gRNA comprising the sequence set forth in SEQ ID NO:1051 and a Cpf1 variant protein encoded by the sequence set forth in SEQ ID NO:1097 (RNP32, Table 21). In certain embodiments, the Cpf1 variant protein may contain one or more modifications. In certain embodiments, the one or more modifications may include, without limitation, one or more mutations in a wild-type Cpf1 amino acid sequence, one or more mutations in a wild-type Cpf1 nucleic acid sequence, one or more nuclear localization signals (NLS), one or more purification tags (e.g., His tag), or a combination thereof. In certain embodiments, a Cpf1 variant protein may be encoded by a sequence set forth in SEQ ID NOs:1000, 1001, 1008-1018, 1032, 1035-39, 1094-1097, 1107-09 (Cpf1 polypeptide sequences) or SEQ ID NOs:1019-1021, 1110-17 (Cpf1 polynucleotide sequences). In certain embodiments, a booster element may be co-delivered with the RNP complex. In certain embodiment, a booster element may comprise a single stranded oligodeoxynucleotide (ssODN) or a double stranded oligodeoxynucleotide (dsODN). In certain embodiments, the ssODN may be any ssODN disclosed herein. In certain embodiments, an ssODN may comprise a sequence set forth in Table 11. For example, in certain embodiments, an ssODN may comprise the sequence set forth in SEQ ID NO:1040.

[0054] In one aspect, the disclosure relates to a method of alleviating one or more symptoms of sickle cell disease in a subject in need thereof, the method comprising: a) isolating a population of CD34+ or hematopoietic stem cells from the subject; b) modifying the population of isolated cells ex vivo by delivering an RNP complex comprising a gRNA and a Cpf1 RNA-guided nuclease or a variant thereof to the population of isolated cells, thereby to affect an alteration in a promoter of an HBG gene in one or more cells in the population; and c) administering the modified population of cells to the subject, thereby to alleviate one or more symptoms of sickle cell disease in the subject. In certain embodiments, the alteration may comprise an indel within a CCAAT box target region of the promoter of the HBG gene. In certain embodiments, the RNP complex may be delivered using electroporation. In certain embodiments, at least about 5%, at least about 10%, at least about 20%, at least about 30%, at least about 40%, at least about 50%, at least about 60%, at least about 70%, at least about 80% or at least about 90% of the cells in the population of cells comprise a productive indel.

[0055] In one aspect, the disclosure relates to a gRNA comprising a 5′ end and a 3′ end, and comprising a DNA extension at the 5′ end and a 2′-O-methyl-3′-phosphorothioate modification at the 3′ end, wherein the gRNA includes an RNA segment capable of hybridizing to a target site and an RNA segment capable of associating with a Cpf1 RNA-guided nuclease. In certain embodiments, the DNA extension may comprise a sequence set forth in SEQ ID NOs:1235-1250. In certain embodiments, the gRNA may be modified or unmodified. In certain embodiments, the gRNA may comprise one or more modifications including a phosphorothioate linkage modification, a phosphorodithioate (PS2) linkage modification, a 2′-O-methyl modification, a DNA extension, an RNA extension, or combinations thereof. In certain embodiments, the DNA extension may comprise a sequence set forth in Table 24. In certain embodiments, the RNA extension may comprise a sequence set forth in Table 24. In certain embodiments, the gRNA may comprise a sequence set forth in Table 13, Table 18, or Table 19.

[0056] In one aspect, the disclosure relates to an RNP complex comprising a Cpf1 RNA-guided nuclease as disclosed herein and a gRNA as disclosed herein.

[0057] Also provided herein are genome editing systems, guide RNAs, and CRISPR-mediated methods for altering one or more γ-globin genes (e.g., HBG1, HBG2, or HBG1 and HBG2), the erythroid specific enhancer of the BCL11A gene (BCL11Ae), or a combination thereof, and increasing expression of fetal hemoglobin (HbF). In certain embodiments, one or more gRNAs comprising a sequence set forth in Table 18 or Table 19 may be used to introduce alterations in the promoter region of the HBG gene. In certain embodiments, genome editing systems, guide RNAs, and CRISPR-mediated methods may alter a 13 nucleotide (nt) target region that is 5′ of the transcription site of the HBG1, HBG2, or HBG1 and HBG2 gene (“13 nt target region”). In certain embodiments, genome editing systems, guide RNAs, and CRISPR-mediated methods may alter a CCAAT box target region that is 5′ of the transcription site of the HBG1, HBG2, or HBG1 and HBG2 gene (“CCAAT box target region”). In certain embodiments, the CCAAT box target region may be the region that is at or near the distal CCAAT box and includes the nucleotides of the distal CCAAT box and 25 nucleotides upstream (5′) and 25 nucleotides downstream (3′) of the distal CCAAT box (i.e., HBG1/2 c.-86 to -140). In certain embodiments, the CCAAT box target region may be the region that is at or near the distal CCAAT box and includes the nucleotides of the distal CCAAT box and 5 nucleotides upstream (5′) and 5 nucleotides downstream (3′) of the distal CCAAT box (i.e., HBG1/2 c.-106 to -120). In certain embodiments, the CCAAT box target region may comprise a 18 nt target region, a 13 nt target region, a 11 nt target region, a 4 nt target region, a 1 nt target region, a -117G>A target region, or a combination thereof as disclosed herein. In certain embodiments, the alteration may be a 18 nt deletion, 13 nt deletion, 11 nt deletion, 4 nt deletion, 1 nt deletion, a substitution from G to A at c.-117 of the HBG1, HBG2, or HBG1 and HBG2 gene, or a combination thereof. In certain embodiments, the alteration may be a non-naturally occurring alteration or a naturally occurring alteration. In certain embodiments, one or more gRNAs comprising a targeting domain set forth in SEQ ID NOs:251-901 or 940-942 may be used to introduce alterations in the 13 nt target region. In certain embodiments, one or more gRNAs comprising a sequence set forth in SEQ ID NOs:251-901, 940-942, 996, 997, 970, 971, 1002, or 1003 may be used to introduce alterations in the CCAAT box target region. In certain embodiments, genome editing systems, guide RNAs, and CRISPR-mediated methods may alter a GATA1 binding motif in BCL11Ae that is in the +58 DNase I hypersensitive site (DHS) region of intron 2 of the BCL11A gene (“GATA1 binding motif in BCL11Ae”). In certain embodiments, one or more gRNAs comprising a targeting domain set forth in SEQ ID NOs:952-955 may be used to introduce alterations in the GATA1 binding motif in BCL11Ae. In certain embodiments, one or more gRNAs may be used to introduce alterations in the GATA1 binding motif in BCL11Ae and one or more gRNAs may be used to introduce alterations in the 13 nt target region of HBG1 and/or HBG2.

[0058] Also provided herein in certain embodiments are the use of optional genome editing system components such as template nucleic acids (oligonucleotide donor templates). In certain embodiments, template nucleic acids for use in targeting the CCAAT target region may include, without limitation, template nucleic acids encoding alterations of the CCAAT box target region. In certain embodiments, the CCAAT box target region may comprise a 18 nt target region, a 11 nt target region, a 4 nt target region, a 1 nt target region, or a combination thereof. In certain embodiments, the template nucleic acid may be a single stranded oligodeoxynucleotide (ssODN) or a double stranded oligodeoxynucleotide (dsODN). In certain embodiments, 5′ and 3′ homology arms, and exemplary full-length donor templates encoding alterations at the CCAAT box target region are also presented below (e.g., SEQ ID NOS: 904-909, 974-995). In certain embodiments, the template nucleic acid may be a positive strand or a negative strand. In certain embodiments, the ssODN may comprise a 5′ homology arm, a replacement sequence, and a 3′ homology arm. In certain embodiments, the 5′ homology arm may be about 25 to about 200 nucleotides or more in length, e.g., at least about 25, 50, 75, 100, 125, 150, 175, or 200 nucleotides in length; the replacement sequence may comprise 0 nucleotides in length; and the 3′ homology arm may be about 25 to about 200 nucleotides or more in length, e.g., at least about 25, 50, 75, 100, 125, 150, 175, or 200 nucleotides in length. In certain embodiments, the ssODN may comprise one or more phosphorothioates.

[0059] In certain embodiments, the genome editing systems, guide RNAs, and CRISPR-mediated methods for altering one or more γ-globin genes (e.g., HBG1, HBG2, or HBG1 and HBG2), may include an RNA-guided nuclease. In certain embodiments, the RNA-guided nuclease may a Cas9 or modified Cas 9. In certain embodiments, the RNA-guided nuclease may a Cpf1 or modified Cpf1 as disclosed herein.

[0060] In one aspect, the disclosure relates to compositions including a plurality of cells generated by the methods disclosed above, in which at least 20%, 30%, 40%, 50%, 60%, 70%, 80% or 90% of the cells include an alteration of a sequence of a 13 nt target region of the human HBG1 or HBG2 gene or a plurality of cells generated by the methods disclosed above, wherein at least 20%, 30%, 40%, 50%, 60%, 70%, 80% or 90% of the cells include an alteration of a sequence of a 13 nt target region of the human HBG1 or HBG2 gene and at least 20%, 30%, 40%, 50%, 60%, 70%, 80% or 90% of the cells include an alteration of a sequence of the GATA1 binding motif in BCL11Ae. In certain embodiments, at least a portion of the plurality of cells may be within an erythroid lineage. In certain embodiments, the plurality of cells may be characterized by an increased level of fetal hemoglobin expression relative to an unmodified plurality of cells. In certain embodiments, the level of fetal hemoglobin may be increased by at least 20%, 30%, 40%, 50%, 60%, 70%, 80% or 90%. In certain embodiments, the compositions may further include a pharmaceutically acceptable carrier.

[0061] In one aspect, the disclosure relates to a method of altering a cell, that includes unwinding a chromatin segment within or proximal to a target region of a nucleic acid in a cell and generating a double stranded break (DSB) within the target region of the nucleic acid whereby to alter the target region. In certain embodiments, the step of unwinding the chromatin segment may include contacting the chromatin segment with an RNA-guided helicase. In certain embodiments, the step of unwinding the chromatin does not include recruiting an exogenous trans-acting factor to the chromatin segment. The RNA-guided helicase may be an RNA-guided nuclease, and the RNA-guided nuclease may be complexed to a dead guide RNA (dgRNA) including a first targeting domain sequence of 15 or fewer nucleotides in length. In certain embodiments, the dgRNA may include modifications at the 5′ or 3′ end, including, but not limited to, an anti-reverse cap analog (ARCA) at the 5′ end of the RNA, a polyA tail at the 3′ end of the RNA, or both. In certain embodiments, the RNA-guided helicase may be an enzymatically active RNA-guided nuclease or may be configured to lack nuclease activity. In certain embodiments, the targeting domain sequence of the dgRNA may be complementary to a sequence proximal to the target region. “Proximal to,” in some embodiments herein, may mean within 10, 25, 50, 100, or 200 nucleotides of the target region. In certain embodiments, the step of unwinding the chromatin segment may not include forming a single or double-stranded break in the nucleic acid within the chromatin segment. In certain embodiments, the step of generating the DSB within the target region may include contacting the chromatin segment with an RNA-guided nuclease having nuclease activity. In certain embodiments, the RNA-guided nuclease having nuclease activity may be complexed to a gRNA including a targeting domain configured to overlap the target region. In certain embodiments, the RNA-guided nuclease having nuclease activity may be a Cpf1 molecule.

[0062] Another aspect of the disclosure includes a method of inducing accessibility to a target region of a nucleic acid for editing in a cell including contacting the cell with an RNA-guided helicase and a dgRNA and unwinding DNA within or proximal to the target region with the RNA-guided helicase thereby inducing accessibility to the target region for editing. In various cases, the RNA-guided helicase and the dgRNA may be configured to associate within or proximal to the target region. In certain embodiments, the dgRNA may be configured such that it does not provide an RNA-guided nuclease cleavage event. In certain embodiments, the RNA-guided helicase and dgRNA may complex to form a dead ribonucleoprotein (RNP) that lacks cleavage activity. In certain embodiments, the dgRNA may include a targeting domain sequence of 15 or fewer nucleotides in length. In certain embodiments, the RNA-guided helicase may be an RNA-guided nuclease. In certain embodiments, the RNA-guided nuclease and dgRNA are not configured to recruit an exogenous trans-acting factor to the target region. In certain embodiments, the RNA-guided nuclease may be a Cas9 or a Cas9-fusion protein. In certain embodiments, the Cas9 may be an enzymatically active Cas9 or an enzymatically dead Cas9. In certain embodiments, the Cas9 may be a nickase, e.g., Cas9 D10A. In certain embodiments, the step of unwinding the DNA does not comprise forming a single or double-stranded break in the DNA. In certain embodiments, the RNA-guided nuclease having nuclease activity may be complexed to a gRNA including a targeting domain configured to overlap the target region. In certain embodiments, the RNA-guided nuclease having nuclease activity may be a Cpf1 molecule.

[0063] In another aspect, the disclosure relates to a method of increasing a rate of indel formation in a nucleic acid that includes unwinding double stranded DNA within or proximal to a target region of the nucleic acid using an RNA-guided helicase configured to associate within or proximal to the target region and generating a DSB within the target region. In certain embodiments, generating a DSB within the target region results in forming an indel at the target region. In certain embodiments, the DSB may be repaired in a manner forming an indel at the target region. In certain embodiments, the rate of indel formation in the gene achieved using the RNA-guided helicase is increased compared to a rate of indel formation in the gene achieved without using the RNA-guided helicase. In certain embodiments, the RNA-guided helicase may form an RNP complex with a dgRNA configured to associate within or proximal to the target region. In certain embodiments, the dgRNA may include a targeting domain sequence of 15 nucleotides or less in length. In certain embodiments, the RNA-guided helicase may be an RNA-guided nuclease. In certain embodiments, the RNA-guided nuclease may be a Cas9 or a Cas9-fusion protein. In certain embodiments, the Cas9 may be an enzymatically active Cas9 or an enzymatically dead Cas9. In certain embodiments, the Cas9 may be a nickase, e.g., Cas9 D10A. In certain embodiments, the RNA-guided nuclease and the dgRNA are not configured to recruit an exogenous trans-acting factor to the target region. In certain embodiments, the step of unwinding the double stranded DNA does not include forming a single or double-stranded break in the DNA.

[0064] In yet another aspect, this disclosure relates to a method of deleting a segment of a target nucleic acid in a cell that includes contacting the cell with an RNA-guided helicase and generating a DSB within the target region, whereby a segment of the target nucleic acid is deleted. In certain embodiments, the DSB may be repaired in a manner that deletes a segment of the target nucleic acid. In certain embodiments, the RNA-guided helicase may be configured to associate within or proximal to a target region of the target nucleic acid and unwind double stranded DNA (dsDNA) within or proximal to the target region. In certain embodiments, the RNA-guided helicase may form an ribonucleoprotein complex with a dgRNA configured to associate within or proximal to the target region. In certain embodiments, the dgRNA may include a targeting domain sequence of 15 nucleotides or less in length. In certain embodiments, the RNA-guided helicase may be an RNA-guided nuclease. In certain embodiments, the RNA-guided nuclease may be a Cas9 or a Cas9-fusion protein. In certain embodiments, the Cas9 may be an enzymatically active Cas9 or an enzymatically dead Cas9. In certain embodiments, the RNA-guided nuclease and the dgRNA are not configured to recruit an exogenous trans-acting factor to the target region. In certain embodiments, the target nucleic acid may be a promoter region of a gene, a coding region of a gene, a non-coding region of a gene, an intron of a gene, or an exon of a gene. In certain embodiments, the segment of the target nucleic acid may be at least about 15, 20, 25, 30, 35, 40, 45, 50, 55, 60, 65, 70, 75, or 100 base pairs in length.

[0065] The disclosure also relates to a dead gRNA (dgRNA) molecule including a targeting domain comprising a truncation of a gRNA targeting domain. In certain embodiments, the gRNA targeting domain to be truncated may be a gRNA targeting domain set forth in Table 2, Table 10, or Table 15. In certain embodiments, the gRNA targeting domain may be truncated from a 5′ end of the gRNA targeting domain. In certain embodiments, the dgRNA may include a targeting domain sequence of 15 nucleotides or less in length. In certain embodiments, the first targeting domain may be the same as or may differ by no more than 3 nucleotides from a dgRNA targeting domain set forth in Table 10 or Table 15.

[0066] Another aspect of the disclosure relates to compositions including at least one polynucleotide encoding a plurality of gRNAs and an RNA-guided helicase, in which at least one gRNA may be a dgRNA configured such that it does not provide an RNA-guided nuclease cleavage event. In certain embodiments, the dgRNA may include a targeting domain sequence of 15 nucleotides or less in length. In certain embodiments, the RNA-guided helicase may be an RNA-guided nuclease. In certain embodiments, the RNA-guided nuclease may be a Cas9 or a Cas9-fusion protein. In certain embodiments, the Cas9 may be an enzymatically active Cas9 or an enzymatically dead Cas9. In certain embodiments, the Cas9 may be a nickase, e.g., Cas9 D10A. In certain embodiments, the RNA-guided nuclease and the dgRNA are not configured to recruit an exogenous trans-acting factor to the target region. In certain embodiments, the compositions further include a second RNA-guided nuclease configured to provide a cleavage event. In certain embodiments, the compositions further include a second gRNA configured to provide a cleavage event.

[0067] In another aspect, the disclosure relates to genome editing systems that include an RNA-guided nuclease and an RNA-guided helicase configured to associate with a target nucleic acid proximal to a target region of the target nucleic acid and induce a conformational change in the target region thereby promoting accessibility to the target region for the RNA-guided nuclease to form a break in the target region. The disclosure also relates to genome editing systems that include a dgRNA including a targeting domain sequence of 15 nucleotides or less in length, a first RNA-guided nuclease, and an RNA-guided helicase. In certain embodiments, the genome editing system further includes a gRNA. In certain embodiments, the gRNA and the first RNA-guided nuclease may associate with a target region in a target nucleic acid. In certain embodiments, the first RNA-guided nuclease may be a Cpf1 molecule. In certain embodiments, the gRNA and the first RNA-guided nuclease may associate with a first PAM sequence in a target nucleic acid, wherein the first PAM sequence is facing outward. In certain embodiments, the RNA-guided helicase may be a second RNA-guided nuclease. In certain embodiments, the second RNA-guided nuclease and the dgRNA are not configured to recruit an exogenous trans-acting factor to the target region. In certain embodiments, the dgRNA and the second RNA-guided nuclease associate within or proximal to a target region in the target nucleic acid. In certain embodiments, the first RNA-guided nuclease and second RNA-guided nuclease may be complexed with the gRNA and dgRNAs, respectively, forming first and second ribonucleoprotein complexes.

[0068] In another aspect, the disclosure relates to a genome editing system that includes a dgRNA comprising a targeting domain sequence of 15 nucleotides or less in length, a first RNA-guided nuclease, and an RNA-guided helicase. In certain embodiments, the gRNA and the first RNA-guided nuclease may associate with a target region in a target nucleic acid. In certain embodiments, the first RNA-guided nuclease may be a Cpf1 molecule. In certain embodiments, the gRNA and the first RNA-guided nuclease may associate with a first protospacer adjacent motif (PAM) sequence in a target nucleic acid. In certain embodiments, the first PAM sequence may be facing outward. In certain embodiments, the RNA-guided helicase may be a second RNA-guided nuclease. In certain embodiments, the second RNA-guided nuclease and the dgRNA are not configured to recruit an exogenous trans-acting factor to the target region. In certain embodiments, the dgRNA and the second RNA-guided nuclease may associate within or proximal to a target region in the target nucleic acid. In certain embodiments, the first RNA-guided nuclease and second RNA-guided nuclease may be complexed with the gRNA and dgRNAs, respectively, forming first and second ribonucleoprotein complexes. In certain embodiments, the dgRNA and the second RNA-guided nuclease may associate with a second PAM sequence in a target nucleic acid, wherein the second PAM sequence may be facing outward.

[0069] In another aspect, the disclosure relates to a genome editing system that includes a dgRNA, a first gRNA comprising a second targeting domain sequence greater than 17 nucleotides in length, a first RNA-guided nuclease, and a second RNA-guided nuclease. In certain embodiments, the first RNA-guided nuclease and the dgRNA may be configured to associate within a first target region in a target nucleic acid. In certain embodiments, the second RNA-guided nuclease and the first gRNA may be configured to associate within a second target region and generate a double stranded break (DSB) in the target nucleic acid whereby to create an indel between the first target region and the second target region. In certain embodiments, the second RNA-guided nuclease may be a Cpf1 molecule. In certain embodiments, the dgRNA may comprise a first targeting domain sequence of 15 nucleotides or less in length. In certain embodiments, the dgRNA has reduced or no RNA-guided nuclease cleavage activity. In certain embodiments, the dgRNA may be configured such that it does not provide an RNA-guided nuclease cleavage event. In certain embodiments, the dgRNA and the first RNA-guided nuclease may associate with a first protospacer adjacent motif (PAM) sequence in the target nucleic acid. In certain embodiments, the first PAM sequence may be facing outward. In certain embodiments, the first gRNA and the second RNA-guided nuclease may associate with a second PAM sequence in the target nucleic acid. In certain embodiments, the second PAM sequence may be facing outward.

[0070] In another aspect, the disclosure relates to a method of altering a cell, including contacting the cell with a dgRNA, a first gRNA comprising a second targeting domain sequence greater than 17 nucleotides in length, a first RNA-guided nuclease, and a second RNA-guided nuclease. In certain embodiments, the first RNA-guided nuclease and the dgRNA may be configured to associate within a first target region in a target nucleic acid. In certain embodiments, the second RNA-guided nuclease and the first gRNA may associate within a second target region and generate a double stranded break (DSB) in the target nucleic acid whereby to create an indel between the first target region and the second target region. In certain embodiments, the second RNA-guided nuclease may be a Cpf1 molecule. In certain embodiments, the dgRNA may comprise a first targeting domain sequence of 15 nucleotides or less in length. In certain embodiments, the dgRNA has reduced or no RNA-guided nuclease cleavage activity. In certain embodiments, the dgRNA may be configured such that it does not provide an RNA-guided nuclease cleavage event. In certain embodiments, the dgRNA and the first RNA-guided nuclease may associate with a first protospacer adjacent motif (PAM) sequence in the target nucleic acid. In certain embodiments, the first PAM sequence may be facing outward. In certain embodiments, the first gRNA and the second RNA-guided nuclease may associate with a second PAM sequence in the target nucleic acid. In certain embodiments, the second PAM sequence may be facing outward.

[0071] The disclosure herein also relates to methods of altering a cells, including contacting a cell with any of the genome editing systems disclosed herein. In certain embodiments, the step of contacting the cell may comprise contacting the cell with a solution comprising first and second ribonucleoprotein complexes. In certain embodiments, the step of contacting the cell with the solution further comprises electroporating the cells, thereby introducing the first and second ribonucleoprotein complexes into the cell.

[0072] In another aspect, the disclosure relates to cells that are altered using the methods disclosed herein. Cells that include a productive indel which results in HbF expression are also disclosed herein. In certain embodiments the indel may be produced by contacting the cell with a dgRNA, a first gRNA including a second targeting domain sequence greater than 17 nucleotides in length, a first RNA-guided nuclease, and a second RNA-guided nuclease. In certain embodiments, the first RNA-guided nuclease and the dgRNA may be configured to associate within a first target region in a target nucleic acid. In certain embodiments, the second RNA-guided nuclease and the first gRNA may associate with a second target region and generate a double stranded break (DSB) in the target nucleic acid whereby to create an indel between the first target region and the second target region. In certain embodiments, the cells disclosed herein, may be capable of differentiating into an erythroblast, erythrocyte, or a precursor of an erythrocyte or erythroblast. In certain embodiments, the cell may be a CD34+ cell.

[0073] A genome editing system or method including any of all of the features described above may include a target nucleic acid comprising a human HBG1, HBG2 gene, or a combination thereof. In certain embodiments, the target region may be a CCAAT box target region of the human HBG1, HBG2 gene, or a combination thereof. In certain embodiments, the first targeting domain sequence may be complementary to a first sequence on a side of a CCAAT box target region of the human HBG1, HBG2 gene, or a combination thereof, in which the first sequence optionally overlaps the CCAAT box target region of the human HBG1, HBG2 gene, or a combination thereof. In certain embodiments, the second targeting domain sequence may be complementary to a second sequence on a side of a CCAAT box target region of the human HBG1, HBG2 gene, or a combination thereof, in which the second sequence optionally overlaps the CCAAT box target region of the human HBG1, HBG2 gene, or a combination thereof. In certain embodiments, the first targeting domain may comprise a truncation of a gRNA targeting domain. In certain embodiments, the gRNA targeting domain may include the gRNAs set forth in Table 2, Table 10, or Table 15, and the gRNA targeting domain has been truncated from a 5′ end of the gRNA targeting domain. In certain embodiments, the first targeting domain may be the same as or differs by no more than 3 nucleotides from a dgRNA targeting domain set forth in Table 10 or Table 15. In certain embodiments, the second targeting domain differs by no more than 3 nucleotides from a gRNA targeting domain set forth in Table 2, Table 10, or Table 15. In certain embodiments, the indel may alter the CCAAT box target region indel. In certain embodiments, the indel may be a productive indel resulting in an increased level of fetal hemoglobin expression. In certain embodiments, the gRNA, dgRNA, or both may be in vitro synthesized or chemically synthesized.

[0074] In certain embodiments, a cell may include at least one modified allele of the HBG locus generated by any of the methods for altering a cell disclosed herein, in which the modified allele of the HBG locus comprises an alteration of the human HBG1 gene, HBG2, gene, or a combination thereof.

[0075] In certain embodiments, an isolated population of cells may be modified by any of the methods for altering a cells disclosed herein, wherein the population of cells may include a distribution of indels that may be different from an isolated population of cells or their progenies of the same cell type that have not been modified by the method.

[0076] In certain embodiments, a plurality of cells may be generated by any of the methods for altering a cells disclosed herein, in which at least 20%, 30%, 40%, 50%, 60%, 70%, 80%, or 90% of the cells may include an alteration of a sequence in the CCAAT box target region of the human HBG1 gene, HBG2 gene or a combination thereof.

[0077] In certain embodiments, the cells disclosed herein may be used for a medicament. In certain embodiments, the cells may be for use in the treatment of β-hemoglobinopathy. In certain embodiments, β-hemoglobinopathy may be selected from the group consisting of sickle cell disease and beta-thalassemia.

[0078] In one aspect, the disclosure relates to compositions including a plurality of cells generated by a method including a dgRNA disclosed above, in which at least 20%, 30%, 40%, 50%, 60%, 70%, 80% or 90% of the cells include an alteration of a sequence of a CCAAT box target region of the human HBG1 or HBG2 gene or a plurality of cells generated by the method disclosed above, wherein at least 20%, 30%, 40%, 50%, 60%, 70%, 80% or 90% of the cells include an alteration of a sequence of a CCAAT box target region of the human HBG1 or HBG2. In certain embodiments, at least a portion of the plurality of cells may be within an erythroid lineage. In certain embodiments, the plurality of cells may be characterized by an increased level of fetal hemoglobin expression relative to an unmodified plurality of cells. In certain embodiments, the level of fetal hemoglobin may be increased by at least 20%, 30%, 40%, 50%, 60%, 70%, 80% or 90%. In certain embodiments, the compositions may further include a pharmaceutically acceptable carrier.

[0079] In one aspect, the disclosure relates to a population of cells modified by a genome editing system including a dgRNA described above, wherein the population of cells comprise a higher percentage of a productive indel relative to a population of cells not modified by the genome editing system. The disclosure also relates to a population of cells modified by the genome editing system including a dgRNA described above, wherein a higher percentage of the population of cells are capable of differentiating into a population of cells of an erythroid lineage that express HbF relative to a population of cells not modified by the genome editing system. In certain embodiments, the higher percentage may be at least about 15%, at least about 20%, at least about 25%, at least about 30%, or at least about 40% higher. In certain embodiments, the cells may be hematopoietic stem cells. In certain embodiments, the cells may be capable of differentiating into an erythroblast, erythrocyte, or a precursor of an erythrocyte or erythroblast. In certain embodiments, the indel may be created by a repair mechanism other than microhomology-mediated end joining (MMEJ) repair.

[0080] The disclosure also relates to the use of any of the cells disclosed herein in the manufacture of a medicament for treating β-hemoglobinopathy in a subject.

[0081] In one aspect, the disclosure relates to a method of treating a β-hemoglobinopathy in a subject in need thereof, comprising administering to the subject the cells disclosed herein. In certain embodiments, a method of treating a β-hemoglobinopathy in a subject in need thereof, may include administering a population of modified hematopoietic cells to the subject, wherein one or more cells have been altered according to the methods of altering a cell disclosed herein.

[0082] In one aspect, the disclosure relates to a genome editing system, comprising: an RNA-guided nuclease; and a first guide RNA, in which the first guide RNA may comprise a first targeting domain that is complementary to a first sequence on a side of a CCAAT box target region of a human HBG1, HBG2 gene, or a combination thereof, in which the first sequence optionally overlaps the CCAAT box target region of the human HBG1, HBG2 gene, or a combination thereof. In certain embodiments, the genome editing system may further comprise a template nucleic acid encoding an alteration of the CCAAT box target region of a human HBG1, HBG2 gene, or a combination thereof. In certain embodiments, the template nucleic acid may be a single stranded oligodeoxynucleotide (ssODN) or a double stranded oligodeoxynucleotide (dsODN). In certain embodiments, the ssODN may comprise a 5′ homology arm, a replacement sequence, and a 3′ homology arm. In certain embodiments, the homology arms may be symmetrical in length. In certain embodiments, the homology arms may be asymmetrical in length. In certain embodiments, the ssODN may comprise one or more phosphorothioate modifications. In certain embodiments, the one or more phosphorothioate modifications may be at the 5′ end, the 3′ end or a combination thereof. In certain embodiments, the ssODN may be a positive or negative strand. In certain embodiments, the alteration may be a non-naturally occurring alteration. In certain embodiments, the alteration may comprise a deletion of the CCAAT box target region. In certain embodiments, the deletion may comprise a 18 nt deletion, a 11 nt deletion, a 4 nt deletion, a 1 nt deletion, or a combination thereof. In certain embodiments, the CCAAT box target region may comprise a 18 nt target region, a 11 nt target region, a 4 nt target region, a 1 nt target region, or a combination thereof. In certain embodiments, the 5′ homology arm may be about 25 to about 200 or more nucleotides in length, e.g., at about least 25, 50, 75, 100, 125, 150, 175, or 200 nucleotides in length; the replacement sequence may comprise 0 nucleotides in length; and the 3′ homology arm may be about 25 to about 200 or more nucleotides in length, e.g., at least about 25, 50, 75, 100, 125, 150, 175, or 200 nucleotides in length. In certain embodiments, the 5′ homology arm may comprise about 50 to 100 bp, e.g., 55 to 95, 60 to 90, 70 to 90, or 80 to 90 bp, homology 5′ of the 18 nt target region and the 3′ homology arm may comprise about 50 to 100 bp, e.g., 55 to 95, 60 to 90, 70 to 90, or 80 to 90 bp, homology 3′ of the 18 nt target region. In certain embodiments, the ssODN may comprise, may consist essentially of, or may consist of SEQ ID NO:974 or SEQ ID NO:975. In certain embodiments, the 5′ homology arm may comprise about 50 to 100 bp, e.g., 55 to 95, 60 to 90, 70 to 90, or 80 to 90 bp, homology 5′ of the 11 nt target region and the 3′ homology arm may comprise about 50 to 100 bp, e.g., 55 to 95, 60 to 90, 70 to 90, or 80 to 90 bp, homology 3′ of the 11 nt target region. In certain embodiments, the ssODN may comprise, may consist essentially of, or may consist of SEQ ID NO:976 or SEQ ID NO:978. In certain embodiments, the 5′ homology arm may comprise about 50 to 100 bp, e.g., 55 to 95, 60 to 90, 70 to 90, or 80 to 90 bp, homology 5′ of the 4 nt target region and the 3′ homology arm may comprise about 50 to 100 bp, e.g., 55 to 95, 60 to 90, 70 to 90, or 80 to 90 bp, homology 3′ of the 4 nt target region. In certain embodiments, the ssODN may comprise, may consist essentially of, or may consist of a sequence selected from the group consisting of SEQ ID NO:984, SEQ ID NO:985, SEQ ID NO:986, SEQ ID NO:987, SEQ ID NO:988, SEQ ID NO:989, SEQ ID NO:990, SEQ ID NO:991, SEQ ID NO:992, SEQ ID NO:993, SEQ ID NO:994, and SEQ ID NO:995. In certain embodiments, the 5′ homology arm may comprise about 50 to 100 bp, e.g., 55 to 95, 60 to 90, 70 to 90, or 80 to 90 bp, homology 5′ of the 1 nt target region and the 3′ homology arm may comprise about 50 to 100 bp, e.g., 55 to 95, 60 to 90, 70 to 90, or 80 to 90 bp, homology 3′ of the 1 nt target region. In certain embodiments, the homology arms may be symmetrical in length. In certain embodiments, the ssODN may comprise, may consist essentially of, or may consist of SEQ ID NO:982 or SEQ ID NO:983. In certain embodiments, the alteration may be a naturally occurring alteration. In certain embodiments, the alteration may comprise a deletion or mutation of the CCAAT box target region. In certain embodiments, the CCAAT box target region may comprise a 13 nt target region, -117G>A target region, or a combination thereof. In certain embodiments, the alteration may comprise a 13 nt deletion at the 13 nt target region or a substitution from G to A at the -117G>A target region, or a combination thereof. In certain embodiments, the 5′ homology arm may comprise about 50 to 100 bp, e.g., 55 to 95, 60 to 90, 70 to 90, or 80 to 90 bp, homology 5′ of the 13 nt target region and the 3′ homology arm may comprise about 50 to 100 bp, e.g., 55 to 95, 60 to 90, 70 to 90, or 80 to 90 bp, homology 3′ of the 13 nt target region. In certain embodiments, the ssODN may comprise, may consist essentially of, or may consist of SEQ ID NO:977 or SEQ ID NO:979. In certain embodiments, the 5′ homology arm may comprise about 50 to 100 bp, e.g., 55 to 95, 60 to 90, 70 to 90, or 80 to 90 bp, homology 5′ of the 13 nt target region and the 3′ homology arm may comprise about 50 to 100 bp, e.g., 55 to 95, 60 to 90, 70 to 90, or 80 to 90 bp, homology 3′ of the 13 nt target region. In certain embodiments, the ssODN may comprise, may consist essentially of, or may consist of SEQ ID NO:980 or SEQ ID NO:981. In certain embodiments, the RNA-guided nuclease may be an S. pyogenes Cas9. In certain embodiments, the RNA-guided nuclease may be a Cpf1 variant as disclosed herein. In certain embodiments, the first targeting domain may differ by no more than 3 nucleotides from a targeting domain listed in Table 7, Table 18, Table 19 or a gRNA in Table 12, Table 19. In certain embodiments, the genome editing system may further comprise a second guide RNA, wherein the second guide RNA may comprise a second targeting domain that may be complementary to a second sequence on a side of a CCAAT box target region of a human HBG1, HBG2 gene, or a combination thereof, wherein the second sequence optionally overlaps the CCAAT box target region of the human HBG1, HBG2 gene, or a combination thereof. In certain embodiments, the RNA-guided nuclease may be a nickase, and optionally lacks RuvC activity. In certain embodiments, the genome editing system may comprise first and second RNA-guided nucleases. In certain embodiments, the first and second RNA-guided nucleases may be complexed with the first and second guide RNAs, respectively, forming first and second ribonucleoprotein complexes. In certain embodiments, the genome editing system may further comprise a third guide RNA; and optionally a fourth guide RNA, wherein the third and fourth guide RNAs may comprise third and fourth targeting domains complimentary to third and fourth sequences on opposite sides of positions of a GATA1 binding motif in BCL11A erythroid enhancer (BCL11Ae) of a human BCL11A gene, wherein one or both of the third and fourth sequences optionally overlaps the GATA1 binding motif in BCL11Ae of the human BCL11A gene. In certain embodiments, the genome editing system may further comprise a nucleic acid template encoding a deletion of the GATA1 binding motif in BCL11Ae. In certain embodiments, the RNA-guided nuclease may be an S. pyogenes Cas9. In certain embodiments, the RNA-guided nuclease may be a nickase, and optionally lacks RuvC activity. In certain embodiments, the third targeting domain may be complimentary to a sequence within 1000 nucleotides upstream of the GATA1 binding motif in BCL11Ae. In certain embodiments, the third targeting domain may be complimentary to a sequence within 100 nucleotides upstream of the GATA1 binding motif in BCL11Ae. In certain embodiments, one of the third and fourth targeting domains may be complimentary to a sequence within 100 nucleotides downstream of the GATA1 binding motif in BCL11Ae. In certain embodiments, the fourth targeting domain may be complimentary to a sequence within 50 nucleotides downstream of the GATA1 binding motif in BCL11Ae. In certain embodiments, at least one of the third and fourth targeting domains may differ by no more than 3 nucleotides from a targeting domain listed in Table 9. In certain embodiments, genome editing system may comprise first and second RNA-guided nucleases. In certain embodiments, the first and second RNA-guided nucleases may be complexed with the third and fourth guide RNAs, respectively, forming third and fourth ribonucleoprotein complexes.

[0083] In one aspect, the disclosure relates to a method of altering a cell comprising contacting a cell with a genome editing system. In certain embodiments, the step of contacting the cell with the genome editing system may comprise contacting the cell with a solution comprising first and second ribonucleoprotein complexes. In certain embodiments, the step of contacting the cell with the solution may further comprise electroporating the cells, thereby introducing the first and second ribonucleoprotein complexes into the cell. In certain embodiments, the method of altering a cell may further comprise contacting the cell with a genome editing system, wherein the step of contacting the cell with the genome editing system may comprise contacting the cell with a solution comprising first, second, third, and optionally, fourth ribonucleoprotein complexes. In certain embodiments, the step of contacting the cell with the solution may further comprise electroporating the cells, thereby introducing the first, second, third, and optionally, fourth ribonucleoprotein complexes into the cell. In certain embodiments, the cell may be capable of differentiating into an erythroblast, erythrocyte, or a precursor of an erythrocyte or erythroblast. In certain embodiments, the cell may be a CD34+ cell.

[0084] In one aspect, the disclosure relates to a CRISPR-mediated method of altering a cell, comprising: introducing a first DNA single strand break (SSB) or double strand break (DSB) within a genome of the cell between positions c.-106 to -120 of a human HBG1 or HBG2 gene; and optionally introducing a second SSB or DSB within the genome of the cell between positions c.-106 to -120 of the human HBG1 or HBG2 gene, wherein the first and second SSBs or DSBs may be repaired by the cell in a manner that alters a CCAAT box target region of the human HBG1 or HBG2 gene. In certain embodiments, the first and second SSBs or DSBs may be repaired by the cell in a manner that results in the alteration of a CCAAT box target region of the human HBG1 or HBG2 gene. In certain embodiments, the CRISPR-mediated method may further comprise a template nucleic acid encoding the alteration of the CCAAT box target region of a human HBG1, HBG2 gene, or a combination thereof. In certain embodiments, the template nucleic acid may be a single stranded oligodeoxynucleotide (ssODN). In certain embodiments, the ssODN may comprise a 5′ homology arm, a replacement sequence, and a 3′ homology arm. In certain embodiments, the ssODNs may be a positive or negative strand. In certain embodiments, the alteration may be a non-naturally occurring alteration. In certain embodiments, the first and second SSBs or DSBs may be repaired by the cell in a manner that results in the formation of at least one of an indel, a deletion, or an insertion in the CCAAT box target region of the human HBG1 or HBG2 gene. In certain embodiments, the CCAAT box target region may comprise a 18 nt target region, a 11 nt target region, a 4 nt target region, a 1 nt target region, or a combination thereof. In certain embodiments, the 5′ homology arm may be about 25 to about 200 nucleotides or more in length, e.g., at least about 25, 50, 75, 100, 125, 150, 175, or 200 nucleotides in length; the replacement sequence may comprise 0 nucleotides in length; and the 3′ homology arm may be about 25 to about 200 nucleotides or more in length, e.g., at least about 25, 50, 75, 100, 125, 150, 175, or 200 nucleotides in length. In certain embodiments, the 5′ homology arm may comprise about 50 to 100 bp, e.g., 55 to 95, 60 to 90, 70 to 90, or 80 to 90 bp, homology 5′ of the 18 nt target region, the 11 nt target region, the 4 nt target region, or the 1 nt target region and the 3′ homology arm may comprise about 50 to 100 bp, e.g., 55 to 95, 60 to 90, 70 to 90, or 80 to 90 bp, homology 3′ of 18 nt target region, the 11 nt target region, the 4 nt target region, or the 1 nt target region. In certain embodiments, the ssODN may comprise, may consist essentially of, or may consist of a sequence selected from the group consisting of SEQ ID NO:974, SEQ ID NO:975, SEQ ID NO:976, SEQ ID NO:978, SEQ ID NO:984, SEQ ID NO:985, SEQ ID NO:986, SEQ ID NO:987, SEQ ID NO:988, SEQ ID NO:989, SEQ ID NO:990, SEQ ID NO:991, SEQ ID NO:992, SEQ ID NO:993, SEQ ID NO:994, SEQ ID NO:995, SEQ ID NO:982 and SEQ ID NO:983. In certain embodiments, the alteration may be a non-naturally occurring alteration. In certain embodiments, the first and second SSBs or DSBs may be repaired by the cell in a manner that results in the formation of at least one of an indel, a deletion, or an insertion in the CCAAT box target region of the human HBG1 or HBG2 gene. In certain embodiments, the CCAAT box target region may comprise a 13 nt target region, -117G>A target region, or a combination thereof. In certain embodiments, the alteration may comprise a 13 nt deletion at the 13 nt target region or a substitution from G to A at the -117G>A target region, or a combination thereof. In certain embodiments, the 5′ homology arm may comprise about 50 to 100 bp, e.g., 55 to 95, 60 to 90, 70 to 90, or 80 to 90 bp, homology 5′ of the 13 nt target region or the -117G>A target region and the 3′ homology arm may comprise about 50 to 100 bp, e.g., 55 to 95, 60 to 90, 70 to 90, or 80 to 90 bp, homology 3′ of the 13 nt target region or the -117G>A target region. In certain embodiments, the ssODN may comprise, may consist essentially of, or may consist of a sequence selected from the group consisting of SEQ ID NO:977 or SEQ ID NO:979. SEQ ID NO:980 or SEQ ID NO:981.

[0085] In one aspect, the disclosure relates to a composition that may comprise a plurality of cells generated by a method of altering a cell disclosed herein, wherein at least 20%, 30%, 40%, 50%, 60%, 70%, 80% or 90% of the cells may comprise an alteration of a sequence of a CCAAT box target region of the human HBG1 gene, HBG2 gene, or a combination thereof. In certain embodiments, the alteration may comprise a 18 nt deletion, a 11 nt deletion, a 4 nt deletion, a 1 nt deletion, a 13 nt deletion, a substitution from G to A at the -117, of the human HBG1 gene, HBG2 gene, or a combination thereof. In certain embodiments, at least a portion of the plurality of cells may be within an erythroid lineage. In certain embodiments, the plurality of cells may be characterized by an increased level of fetal hemoglobin expression relative to an unmodified plurality of cells. In certain embodiments, the level of fetal hemoglobin may be increased by at least 20%, 30%, 40%, 50%, 60%, 70%, 80% or 90%. In certain embodiments, the composition may further comprise a pharmaceutically acceptable carrier.

[0086] In one aspect, the disclosure relates to a cell comprising a synthetic genotype generated by a method of altering a cell disclosed herein, wherein the cell may comprise a 18 nt deletion, a 11 nt deletion, a 4 nt deletion, a 1 nt deletion, a 13 nt deletion, a substitution from G to A at the -117, of the human HBG1 gene, HBG2 gene, or a combination thereof.

[0087] In one aspect, the disclosure relates to a cell comprising at least one allele of the HBG locus generated by a method of altering a cell disclosed herein, wherein the cell may encode a 18 nt deletion, a 11 nt deletion, a 4 nt deletion, a 1 nt deletion, a 13 nt deletion, a substitution from G to A at the -117, of the human HBG1 gene, HBG2 gene, or a combination thereof.

[0088] In one aspect, the disclosure relates to an AAV vector that may comprise a template nucleic acid encoding a non-naturally occurring alteration of a CCAAT box target region of a human HBG1, HBG2 gene, or a combination thereof. In certain embodiments, the template nucleic acid may be a single stranded oligodeoxynucleotide (ssODN). In certain embodiments, the CCAAT box target region may comprise a 18 nt target region, a 11 nt target region, a 4 nt target region, a 1 nt target region, or a combination thereof. In certain embodiments, the ssODN may comprise a 5′ homology arm, a replacement sequence, and a 3′ homology arm. In certain embodiments, the 5′ homology arm may be about 25 to about 200 or more nucleotides in length, e.g., at least about 25, 50, 75, 100, 125, 150, 175, or 200 nucleotides in length; the replacement sequence may comprise 0 nucleotides in length; and the 3′ homology arm may be about 25 to about 200 or more nucleotides in length, e.g., at least about 25, 50, 75, 100, 125, 150, 175, or 200 nucleotides in length. In certain embodiments, the 5′ homology arm may comprise about 50 to 100 bp, e.g., 55 to 95, 60 to 90, 70 to 90, or 80 to 90 bp, homology 5′ of the 18 nt target region, the 11 nt target region, the 4 nt target region, or the 1 nt target region and the 3′ homology arm may comprise about 50 to 100 bp, e.g., 55 to 95, 60 to 90, 70 to 90, or 80 to 90 bp, homology 3′ of 18 nt target region, the 11 nt target region, the 4 nt target region, or the 1 nt target region. In certain embodiments, the ssODN may comprise, may consist essentially of, or may consist of a sequence selected from the group consisting of SEQ ID NO:974-976, SEQ ID NO:978, SEQ ID NO:982-995.

[0089] In one aspect, the disclosure relates to a nucleotide sequence comprising a template nucleic acid encoding a non-naturally occurring alteration of a CCAAT box target region of a human HBG1, HBG2 gene, or a combination thereof. In certain embodiments, the template nucleic acid may be a single stranded oligodeoxynucleotide (ssODN) or a double stranded oligodeoxynucleotide (dsODN) comprising the alteration. In certain embodiments, the CCAAT box target region may comprise a 18 nt target region, a 11 nt target region, a 4 nt target region, a 1 nt target region, or a combination thereof. In certain embodiments, the ssODN may comprise a 5′ homology arm, a replacement sequence, and a 3′ homology arm. In certain embodiments, the 5′ homology arm may be about 25 to about 200 or more nucleotides in length, e.g., at least about 25, 50, 75, 100, 125, 150, 175, or 200 nucleotides in length; the replacement sequence may comprise 0 nucleotides in length; and the 3′ homology arm may be about 25 to about 200 or more nucleotides in length, e.g., at least about 25, 50, 75, 100, 125, 150, 175, or 200 nucleotides in length. In certain embodiments, the 5′ homology arm may comprise about 50 to 100 bp, e.g., 55 to 95, 60 to 90, 70 to 90, or 80 to 90 bp, homology 5′ of the 18 nt target region, the 11 nt target region, the 4 nt target region, or the 1 nt target region and the 3′ homology arm may comprise about 50 to 100 bp, e.g., 55 to 95, 60 to 90, 70 to 90, or 80 to 90 bp, homology 3′ of 18 nt target region, the 11 nt target region, the 4 nt target region, or the 1 nt target region. In certain embodiments, the ssODN may comprise, may consist essentially of, or may consist of a sequence selected from the group consisting of SEQ ID NO:974-976, SEQ ID NO:978, SEQ ID NO:982-995.

[0090] In one aspect, the disclosure relates to a cell comprising a synthetic genotype, wherein the cell may comprise a 18 nt deletion, a 11 nt deletion, a 4 nt deletion, a 1 nt deletion, a 13 nt deletion, a substitution from G to A at the -117, of the human HBG1 gene, HBG2 gene, or a combination thereof.

[0091] In one aspect, the disclosure relates to a composition, comprising a population of cells generated by a method of altering a cell disclosed herein, wherein the cells comprise a higher frequency of an alteration of a sequence of a CCAAT box target region of the human HBG1 gene, HBG2 gene, or a combination thereof relative to an unmodified population of cells. In certain embodiments, the higher frequency is at least about 10%, 20%, 30%, 40%, 50%, 60%, 70%, 80% or 90% higher. In certain embodiments, the alteration comprises a 18 nt deletion, a 11 nt deletion, a 4 nt deletion, a 1 nt deletion, a 13 nt deletion, a substitution from G to A at the -117, of the human HBG1 gene, HBG2 gene, or a combination thereof. In certain embodiments, at least a portion of the population of cells are within an erythroid lineage.

[0092] This listing is intended to be exemplary and illustrative rather than comprehensive and limiting. Additional aspects and embodiments may be set out in, or apparent from, the remainder of this disclosure and the claims.

### BRIEF DESCRIPTION OF THE DRAWINGS

[0093] The accompanying drawings are intended to provide illustrative, and schematic rather than comprehensive, examples of certain aspects and embodiments of the present disclosure. The drawings are not intended to be limiting or binding to any particular theory or model, and are not necessarily to scale. Without limiting the foregoing, nucleic acids and polypeptides may be depicted as linear sequences, or as schematic two- or three-dimensional structures; these depictions are intended to be illustrative rather than limiting or binding to any particular model or theory regarding their structure.

[0094] FIG. 1 depicts, in schematic form, HBG1 and HBG2 gene(s) in the context of the β-globin gene cluster on human chromosome 11. FIG. 1. Each gene in the β-globin gene cluster is transcriptionally regulated by a proximal promoter. While not wishing to be bound by any particular theory, it is generally thought that A_{γ} and/or G_{γ} expression is activated by engagement between the proximal promoter with the distal strong erythroid-specific enhancer, the locus control region (LCR). Long-range transactivation by the LCR is thought to be mediated by alteration of chromatin configuration/confirmation. The LCR is marked by 4 erythroid specific Dnase I hypersensitive sites (HS1-4) and 2 distal enhancer elements (5′ HS and 3′ HS1). □-like gene globin gene expression is regulated in a developmental stage-specific manner, and expression of globin genes changes coincide with changes in the main site of blood production.

[0095] FIGS. 2A-2B depict HBG1 and HBG2 genes, coding sequences (CDS) and small deletions and point mutations in and upstream of the HBG1 and HBG2 proximal promoters that have been identified in patients and associated with elevation of fetal hemoglobin (HbF). Core elements within the proximal promoters (CAAT box, 13 nt sequence) that have been deleted in some patients with hereditary persistence of fetal hemoglobin (HPFH). The ‘target sequence’ region of each locus, which has been screened for gRNA binding target sites, is also identified.

[0096] FIGS. 3A-C show data from gRNA screening for incorporation of the 13 nt deletion in human K562 erythroleukemia cells. FIG. 3A Gene editing as determined by T7E1 endonuclease assay analysis (referred to interchangeably as a “T7E1 analysis”) of HBG1 and HBG2 locus-specific PCR products amplified from genomic DNA extracted from K562 cells after electroporation with DNA encoding S. pyogenes-specific gRNAs and plasmid DNA encoding S. pyogenes Cas9. FIG. 3B Gene editing as determined by DNA sequence analysis of PCR products amplified from the HBG1 locus in genomic DNA extracted from K562 cells after electroporation with DNA encoding the indicated gRNA and Cas9 plasmid. FIG. 3C Gene editing as determined by DNA sequence analysis of PCR products amplified from the HBG2 locus in genomic DNA extracted from K562 cells after electroporation with DNA encoding the indicated gRNA and Cas9 plasmid. For FIG. 3B-C, the types of editing events (insertions, deletions) and subtypes of deletions (13 nt target partially [12 nt HPFH] or fully [13-26 nt HPFH] deleted, other sequences deleted [other deletions]) are indicated by the differently shaded/patterned bars.

[0097] FIGS. 4A-C depict results of gene editing in human cord blood (CB) and human adult CD34⁺ cells after electroporation with RNPs complexed to in vitro transcribed S. pyogenes gRNAs that target a specific 13 nt sequence for deletion (HBG sgRNAs Sp35 and Sp37). FIG. 4A depicts the percentage of indels detected by T7E1 analysis of HBG1 and HBG2 specific PCR products amplified from gDNA extracted from CB CD34⁺ cells treated with the indicated RNPs or donor matched untreated control cells (n=3 CB CD34⁺ cells, 3 separate experiments). Data shown represent the mean and error bars correspond to standard deviation across the 3 separate donors/experiments. FIG. 4B depicts the percentage of indels detected by T7E1 analysis of HBG2 specific PCR product amplified from gDNA extracted from CB CD34⁺ cells or adult CD34⁺ cells treated with the indicated RNPs or donor matched untreated control cells (n=3 CB CD34⁺ cells, n=3 mobilized peripheral blood (mPB) CD34⁺ cells, 3 separate experiments). Data shown represent the mean and error bars correspond to standard deviation across the 3 separate donors/experiments. FIG. 4C (Top panel) depicts indels as detected by T7E1 analysis of HBG2 PCR products amplified from gDNA extracted from human CB CD34⁺ cells electroporated with HBG Sp35 RNP or HBG Sp37 RNP+/− ssODN (unmodified or with PhTx modified 5′ and 3′ ends). The lower left panel shows the level of gene editing as determined by Sanger DNA sequence analysis of gDNA from cells edited with HBG Sp37 RNP and ssODN. The lower right panel shows the specific types of deletions detected within total deletions.

[0098] FIGS. 5A-B depict gene editing of HBG in adult human mobilized peripheral blood (mPB) CD34⁺ cells and induction of fetal hemoglobin in erythroid progeny of RNP treated cells after electroporation of mPB CD34⁺ cells with HBG Sp37 RNP+/− ssODN encoding the 13 nt deletion. FIG. 5A depicts the percentage of indels detected by T7E1 analysis of HBG2 PCR product amplified from gDNA extracted from mPB CD34⁺ cells treated with the RNP or donor matched untreated control cells. FIG. 5B depicts the fold change in HBG mRNA expression in day 7 erythroblasts that were differentiated from RNP treated and untreated donor matched control mPB CD34⁺ cells. mRNA levels are normalized to GAPDH and calibrated to the levels detected in untreated controls on the corresponding days of differentiation.

[0099] FIGS. 6A-B depict the ex vivo differentiation potential of RNP treated and untreated mPB CD34⁺ cells from the same donor. FIG. 6A shows hematopoietic myeloid/erythroid colony forming cell (CFC) potential, where the number and subtype of colonies are indicated (GEMM: granulocyte-erythroid-monocyte-macrophage colony, E: erythroid colony, GM: granulocyte-macrophage colony, M: macrophage colony, G: granulocyte colony). FIG. 6B depicts the percentage of Glycophorin A expressed over the time course of erythroid differentiation as determined by flow cytometry analysis at the indicated time points and for the indicated samples.

[0100] FIG. 7A depicts indels detected byT7E1 analysis of HBG PCR product amplified from gDNA extracted from human mPB CD34⁺ cells treated with HBG RNPs (D10A paired nickases). For a subset of samples, cells also received ssODN encoding the 13 nt deletion plus silent SNPs to monitor for HDR (ssODN). FIG. 7B depicts DNA sequencing analysis for select subset of samples shown in FIG. 7A. The indels were subdivided according to the type of indel (insertion, 13 nt deletion, or other deletion).

[0101] FIG. 8A depicts the indels at the HBG target site after electroporation of mPB CD34⁺ cells with the indicated pairs of gRNAs complexed in D10A nickase and WT RNP pairs. FIG. 8B depicts the large deletion events (e.g. deletion of HBG2) after electroporation of mPB CD34⁺ cells with the indicated pairs of gRNAs complexed in D10A nickase and WT RNPs. FIG. 8C depicts DNA sequencing analysis and the subtypes of events (insertions, deletions) detected in gDNA from mPB CD34⁺ cells treated with paired D10A nickase pairs. FIG. 8D depicts DNA sequencing analysis and the subtypes of events (insertions, deletions) detected in gDNA from mPB CD34⁺ cells treated with paired WT RNP pairs.

[0102] FIG. 9 depicts the summary of HbF protein and mRNA expression in the progeny of mPB CD34⁺ cells treated with paired RNPs targeting HBG, for the experiments shown in FIGS. 7 and 8. HbF protein (by HPLC analysis) and HbF mRNA expression (ddPCR analysis) were evaluated in erythroid progeny of RNP treated human mPB CD34⁺ cells (background levels of HbF detected in donor matched untreated controls were subtracted from the levels detected in progeny of RNP treated CD34⁺ cells).

[0103] FIGS. 10A-H depict the indel frequencies and ex vivo and in vivo short-term hematopoietic potential of CD34⁺ cells after treatment with different concentrations (0, 2.5, 3.7 μM) of paired D10A nickase RNPs (SpA+Sp85). Indels were evaluated by T7E1 analysis (FIG. 10A) and by Illumina sequencing analysis (insertions and deletions, FIG. 10B). FIG. 10C depicts the % of HbF protein detected by HPLC analysis (% HbF=100%×HbF/(HbF+HbA). FIG. 10D depicts the hematopoietic activity of the RNP treated and donor matched untreated control CD34⁺ cells in colony forming cell (CFC) assays. CFCs shown are per thousand CD34⁺ cells plated. FIG. 10E depicts human blood CD45⁺ cell reconstitution of the peripheral blood in immunodeficient mice (NSG) 1 month after transplantation with donor matched human mPB CD34⁺ that were either untreated (0 μM), or treated with one of two doses (2.5 and 3.75 μM) of D10A RNP and paired gRNAs. FIG. 10F depicts human blood CD45⁺ cell reconstitution of the peripheral blood in immunodeficient mice (NSG) 2 months after transplantation. FIGS. 10G and 10H depict the lineage distributions following human CD45⁺ blood cell reconstitution of NSG mice at 1 month (FIG. 10G) and 2 months (FIG. 10H).

[0104] FIG. 11A correlates HbF levels as assayed by HPLC and indel frequency as assessed by T7E1 analysis for two D10A nickase RNP pairs (SP37+SPB and SP37+SPA) delivered at the indicated concentrations to mPB CD34⁺ cells. HbF levels were analyzed in erythroid progeny (day 18) of edited CD34⁺ cells. HbF protein detected in donor-matched untreated controls were subtracted from edited samples. FIG. 11B depicts indel rates overlaid on hematopoietic colony forming cell (CFC) activity associated with CD34⁺ cells treated with the indicated D10A nickase pairs or untreated controls. FIG. 11C depicts human CD45⁺ blood cell reconstitution of immunodeficient NSG mice one month after transplantation of mPB CD34⁺ cells treated with indicated D10 RNP nickase pairs at the concentrations given or donor matched untreated controls. FIG. 11D depicts the human blood lineage distribution detected in the human CD45⁺ fraction in mouse peripheral blood one month post-transplant.

[0105] FIG. 12 depicts a target site for derepression of HbF, the GATA1 motif of the +58 DNase I hypersensitive site (DHS) erythroid specific enhancer of BCL11A (BCL11Ae) (genomic coordinates: chr2: 60,495,265 to 60,495,270).

[0106] FIG. 13A depicts the percentage of indels detected by T7E1 endonuclease analysis of BCL11A PCR products amplified from gDNA extracted from CB CD34⁺ cells treated with the indicated RNP+/− ssODN or donor matched untreated control cells. Data shown represent the mean of three 3 separate donors/experiments. FIG. 13B depicts indels detected by T7E1 endonuclease analysis of BCL11A PCR products amplified from gDNA extracted from CB CD34⁺ cells treated with the indicated WT RNP (single gRNA targeting the BCL11A erythroid enhancer complexed to WT S. pyogenes Cas9 having both RuvC and HNH activity) or paired nickase RNP (paired gRNAs targeting the BCL11A erythroid enhancer complexed to S. pyogenes Cas9 nickases sharing the same HNH single stranded cutting activity (e.g. D10A), as well as the hematopoietic activity of cells in each condition.

[0107] FIG. 14A depicts the editing frequency of BCL11Ae (using single gRNA approach targeting the GATA1 motif) in adult human BM CD34⁺ cells. FIG. 14B depicts the monoallelic and bialleleic editing detected in hematopoietic colonies (GEMMs, clonal progeny of BCL11Ae RNP treated CD34⁺ cells) as determined by DNA sequencing analysis. FIG. 14C depicts the kinetics of erythroblast maturation (enucleation as determined by DRAQ5⁻ cells detected by flow cytometry analysis). FIG. 14D depicts the acquisition of erythroid phenotype (Glycophorin A⁺ cells) in differentiated control and RNP-treated BM CD34⁺ cells, while FIG. 14E shows the fold increase in HbF⁺ cells as determined by flow cytometry analysis relative to HbF+ cells in untreated donor matched control samples.

[0108] FIGS. 15A-C depict gene editing of BCL11Ae in adult human mPB CD34⁺ cells and induction of fetal hemoglobin in erythroid progeny of RNP and ssODN treated cells after electroporation of mPB CD34⁺ cells with BCL11Ae RNP+nonspecific ssODN. FIG. 15A depicts the percentage of indels detected by T7E1 analysis of HBG2 PCR product amplified from gDNA extracted from mPB CD34⁺ cells treated with the BCL11Ae RNP and nonspecific ssODN or donor matched untreated control cells. FIG. 15B depicts the fold change in HBG mRNA expression in day 10 erythroblasts that were differentiated from BCL11Ae RNP treated and untreated donor matched control mPB CD34⁺ cells (mRNA levels are normalized to GAPDH and calibrated to the levels detected in untreated controls on the corresponding days of differentiation). FIG. 15C depicts the percentage of Glycophorin A expressed over the time course of erythroid differentiation of mPB CD34⁺ cells +/− treatment with BCL11Ae RNP and nonspecific ssODN, as determined by flow cytometry analysis at the indicated time points and for the indicated samples.

[0109] FIG. 16 depicts the percentage of indels detected by next generation sequencing (NGS) of the HBG PCR product amplified from gDNA extracted from hematopoietic stem/progenitor cells (HSPCs) treated with Cas9 complexed with the chemically synthesized guide RNA OLI7066 (SEQ ID NO:970, Table 10) (“OLI7066-RNP”) at a concentration of 16 μM. Various indels were identified including HBG Δ-102:-121, HBG Δ-114:-124, HBG Δ-116, HBG -114+T, HBG -116+G, HBG Δ-112:-115, HBG Δ-113:-115, HBG Δ-114:-115, HBG Δ-115, HBG Δ-102:-114 (the naturally occurring 13 nt deletion).

[0110] FIGS. 17A-D depict expression levels of G gamma (Gγ)-globin, A gamma (Aγ)-globin chain (or AG gamma (AGγ)-globin resulting from the 4.9 kb deletion) as determined by [gamma chain]/[all-gamma chains+beta chain] compared to relative indels carried at HBG1 or HBG2 as measured by UPLC analysis in the erythroid progeny of single HSPC that were electroporated with Cas9 complexed with the gRNA OLI7066 (SEQ ID NO:970) (“OLI7066-RNP”) (Table 10). FIG. 17A depicts AgammaT (AγT)-globin chain expression as determined by [AγT-globin chain]/[all-gamma chains+beta chain] for clones carrying the indicated indels on the corresponding HBG1 allele (HBG1 Δ-115, HBG1 Δ-114:-115, HBG1 Δ-113:-115, HBG1 Δ-112:-115, HBG1 Δ-102:-114, HBG1 Δ-104:-121, HBG1 Δ-116). FIG. 17B depicts G gamma (Gγ)-globin chain expression as determined by [Gγ-gamma chain]/[all-gamma chains+beta chain] for clones carrying the indicated indels on an HBG2 allele (HBG2 Δ-115, HBG2 Δ-114:-115, HBG2 Δ-113:-115, HBG2 Δ-112:-115, HBG2 Δ-102:-114, HBG2 Δ-104:-121, HBG2 Δ-116). To insure that the analysis of G gamma (Gγ)-globin induction is the result of a single edited allele, only clones with monoallelic editing of HBG2, or with a deletion of one of the HBG2 allele were analyzed (resulting from the 4.9 kb deletion). FIG. 17C depicts AG gammaT (AGγT)-globin chain expression as determined by [AGγT-gamma chain]/[all-gamma chains+beta chain] for clones carrying the indicated indels on the corresponding HBG1/2 allele (HBG1/2 Δ-115, HBG1/2 Δ-114:-115, HBG1/2 Δ-113:-115, HBG1/2 Δ-112:-115, HBG1/2 Δ-102:-114, HBG1/2 Δ-104:-121, HBG1/2 Δ-116). FIG. 17D depicts AGgammaI (AGγl) -globin chain expression as determined by [AGγI-gamma chain]/[all-gamma chains+beta chain] for clones carrying the indicated indels on the corresponding HBG1/2 allele (HBG1/2 Δ-115, HBG1/2 Δ-114:-115, HBG1/2 Δ-113:-115, HBG1/2 Δ-112:-115, HBG1/2 Δ-102:-114, HBG1/2 Δ-104:-121, HBG1/2 Δ-116).

[0111] FIG. 18 depicts, in schematic form, HBG1 and HBG2 gene(s) in the context of the β-globin gene cluster on human chromosome 11. The schematic shows the CCAAT box target sites at HBG1 and HBG2. Due to the homology within this region, a single guide RNA, such as OLI8394 (SEQ ID NO:971), complexed to an RNA nuclease (e.g., Cas9) will cut at both HBG1 and HBG2. The editing outcomes following delivery of Cas9 complexed to OLI8394 (“OLI8394-RNP”) vary and result in different size deletions or insertions. Single stranded oligodeoxynucleotides (ssODN) were designed to provide a template that copies the desired indel signature at the CCAAT box (Table 11). The ssODN “encodes” the respective deletion with sequence homology arms flanking the absent sequence to create a perfect deletion.

[0112] FIGS. 19Δ-G depict results from gene editing of the CCAAT box target region of HBG of adult human CD34+ cells from mPB (“mPB CD34+ cells”) electroporated with 2 μM OLI8394-RNP or OLI7066-RNP and 2.5 μM of various ssODNs (Table 11). FIG. 19A depicts the percentage of indels detected by sequencing the HBG PCR product 72 hours after electroporation with OLI8394-RNP and ssODN OLI16413 (“−11 nt+strand”) or ssODN OLI16411 (“−11 nt−strand”). FIG. 19B depicts the percentage of the precise “−11 nt deletion” to the total indels detected by sequencing the HBG PCR product 72 hours after electroporation with OLI8394-RNP and ssODN OLI16413 (“−11 nt+strand”) or ssODN OLI16411 (“−11 nt−strand”). FIG. 19C depicts the percentage of indels detected by sequencing the HBG PCR product 72 hours after electroporation with OLI8394-RNP and ssODN OLI16430 (“−4 nt+strand”) or ssODN OLI16424 (“−4 nt−strand”). The percentage of the precise -4 nt deletion (i.e., Δ-112:-115) is distinguished from other indels. FIG. 19D depicts the percentage of indels detected by sequencing the HBG PCR product 72 hours after electroporation with OLI8394-RNP and ssODN OLI16418 (“−1 nt+strand”) or ssODN OLI16417 (“−1 nt−strand”). The percentage of the precise -1 nt deletion (i.e., Δ-116) is distinguished from other indels. FIG. 19E depicts the percentage of indels detected by sequencing the HBG PCR product 72 hours after electroporation with OLI8394-RNP and ssODN OLI16409 (“−18 nt+strand”) or ssODN OLI16410 (“−18 nt−strand”). The percentage of the precise -18 nt deletion (i.e., Δ-104:-121) is distinguished from other indels. FIG. 19F depicts the percentage of indels detected by sequencing the HBG PCR product 72 hours after electroporation with OLI7066-RNP and ssODN OLI16414 (“−13 nt+strand”) or ssODN OLI16412 (“−13 nt−strand”). The percentage of the precise -13 nt deletion (i.e., Δ-102:-114) is distinguished from other indels FIG. 19G depicts the percentage of indels detected by sequencing the HBG PCR product 72 hours after electroporation with OLI8394-RNP and ssODN OLI16416 (“-117 G>A+strand”) or ssODN OLI16415 (“-117 G>A−strand”). The percentage of reads with the -117 G>A substitution, with or without indels are distinguished from other reads.

[0113] FIGS. 20A-B depict expression levels of gamma-globin chains over total beta-like globin chains (gamma chains/[gamma chains+beta chain]) as measured by UPLC analysis on the erythroid progeny of mPB CD34⁺ cells that were electroporated with OLI8394-RNP or OLI7066-RNP and various ssODNs (Table 11). FIG. 20A depicts the percentage of gamma-globin chains over total beta-like globin chains (gamma chains/[gamma chains+beta chain]) as measured by UPLC after electroporation with (i) OLI8394-RNP and OLI7066-RNP alone, (ii) OLI8394-RNP and ssODN OLI16430 (“−4 nt+strand”), ssODN OLI16424 (“−4 nt−strand”), ssODN OLI16413 (“−11 nt+strand”), or ssODN OLI16411 (“−11 nt-strand”), and (iii) OLI7066-RNP and ssODN OLI16414 (“−13 nt+strand”) or ssODN OLI16412 (“−13 nt−strand”). FIG. 20B depicts the percentage of gamma-globin chains over total beta-like globin chains (gamma chains/[gamma chains+beta chain]) as measured by UPLC after electroporation with OLI8394-RNP and ssODN OLI16418 (“−1 nt+strand”), ssODN OLI16417 (“−1 nt−strand”), ssODN OLI16416 (“−117 G>A+strand”), ssODN OLI16415 (“-117 G>A−strand”), ssODN OLI16409 (“−18 nt+strand”), or ssODN OLI16410 (“−18 nt−strand”).

[0114] FIGS. 21A-D depict results from gene editing from mPB CD34+ cells electroporated with 2 μM OLI8394-RNP and ssODN OLI16424 (“−4 nt−strand”) (Table 11) at doses ranging from 0.625 μM to 10 μM. FIG. 21A depicts the percentage of indels detected by sequencing the HBG PCR product 72 hours after electroporation. FIG. 21B depicts frequency of 4.9 kb deletions detected by ddPCR between HBG1 and HBG2 after electroporation. FIG. 21C depicts the percentage viability of adult human CD34+ cells from mPB 48 hours after electroporation. FIG. 21D depicts the percentage of gamma-globin chains over total beta-like globin chains (gamma chains/[gamma chains+beta chain]) as measured by UPLC analysis of the cell lysates from the erythroid progeny of electroporated cells.

[0115] FIGS. 22A-D depict results from gene editing from mPB CD34+ cells electroporated with indicated doses of OLI8394-RNP and indicated doses of ssODN OLI16424 (“−4 nt−strand”) (Table 11). FIG. 22A depicts the percentage of indels detected by sequencing the HBG PCR product 72 hours after electroporation with indicated doses (2, 4, or 8 μM) of OLI8394-RNP and indicated doses (0, 1.25, 2.5, or 5 μM) of ssODN OLI16424 (“−4 nt−strand”). FIG. 22B depicts the percentage of -4 nt deletions (“-112:-115 deletions”) detected by next generation sequencing (NGS) of the HBG PCR product after electroporation with indicated doses (2, 4, or 8 μM) of OLI8394-RNP and indicated doses (0, 1.25, 2.5, or 5 μM) of ssODN OLI16424 (“−4 nt−strand”). FIG. 22C depicts frequency of 4.9 kb deletions between HBG1 and HBG2 after electroporation with the indicated doses (2, 4, or 8 μM) of OLI8394-RNP and indicated doses (0, 1.25, 2.5, or 5 μM) of ssODN OLI16424 (“−4 nt−strand”). Deletions were measured via ddPCR. FIG. 22D depicts the percentage of gamma-globin chains over total beta-like globin chains (gamma chains/[gamma chains+beta chain]) as measured by UPLC analysis of the cell lysates from the erythroid progeny of mPB CD34+ cells after electroporation with the indicated doses (2, 4, or 8 μM) of OLI8394-RNP and indicated doses (0, 1.25, 2.5, or 5 μM) of ssODN OLI16424 (“−4 nt−strand”).

[0116] FIGS. 23A-B depict a schematic of and results provided by ssODN templates with symmetrical and asymmetrical homology arms. FIG. 23A depicts the CCAAT box target sites at HBG1 and HBG2 that is targeted by OLI8394 (SEQ ID NO:971) and OLI7066 (SEQ ID NO:970). ssODNs with symmetrical or asymmetrical arms were designed to provide a template that copies the -4 nt deletion (HBG-112:-115) of HBG1 and HBG2 (Table 11). The ssODN “encodes” the respective deletion with sequence homology arms flanking the absent sequence to create a perfect deletion at HBG-112:-115. FIG. 23B depicts the percentage of indels detected by sequencing the HBG PCR product 72 hours after electroporation of mPB CD34+ cells with 2 μM of OLI8394-RNP and 2.5 μM of various ssODNs, OLI16424 (“90/90”), OLI16419 (“40/80”) or OLI16421 (“50/50”), that “encode” the 4 nt deletion (HBG-112:-115) (Table 11).

[0117] FIG. 24 depicts the percentage of indels detected by sequencing the HBG PCR product 72 hours after electroporation of mPB CD34+ cells with D10ACas9 complexed with Sp37 and SpA gRNAs (Table 12) (“sp37-D10A-RNP+spA-D10A-RNP”) alone or with ssODN OLI16424 (“−4 nt−strand”) (Table 11). The percentage of the precise -4 nt deletion (i.e., Δ-112:-115) is distinguished from other indels.

[0118] FIG. 25 depicts gene editing of HBG of mPB CD34⁺ cells electroporated with variants of Acidaminococcus sp. Cpf1 (“AsCpf1”), namely His-AsCpf1-nNLS (SEQ ID NO:1000) and His-AsCpf1-sNLS-sNLS (SEQ ID NO:1001) complexed with the guide RNA HBG1-1 (OLI13620) (Table 13) (“His-AsCpf1-nNLS_HBG1-1 RNP” and “His-AsCpf1-sNLS-sNLS_HBG1-1 RNP”). The RNP were electroporated at 5 μM or 20 μM.

[0119] FIGS. 26A-C depict gene editing of HBG of mPB CD34+ cells electroporated with His-AsCpf1-sNLS-sNLS_HBG1-1 RNP alone or with various ssODNs. FIG. 26A depicts the percentage of indels detected by sequencing the HBG PCR product 72 hours after electroporation with His-AsCpf1-sNLS-sNLS_HBG1-1 RNP alone or with OLI164324 (“−4 nt−strand”), OLI16430 (“−4 nt+strand”), OLI16410 (“−18 nt−strand”), or OLI16409 (“−18 nt+strand”). FIG. 26B depicts the percentage of the precise 18 nucleotide deletion indels detected by sequencing the HBG PCR product 72 hours after electroporation with His-AsCpf1-sNLS-sNLS_HBG1-1 RNP alone or with OLI16410 (“−18 nt−strand”) or OLI16409 (“−18 nt+strand”). FIG. 26C depicts the percentage of the precise 18 nt deletion within all indels detected by sequencing the HBG PCR product 72 hours after electroporation with His-AsCpf1-sNLS-sNLS_HBG1-1 RNP alone or with OLI16410 (“−18 nt−strand”) or OLI16409 (“−18 nt+strand”).

[0120] FIGS. 27A-F depict schematics of the HBG1-1 target region and S. Pyogenes Cas9 gRNA pairs used in combination. FIG. 27A shows the target region of HBG1-I gRNA (comprising the RNA targeting domain set forth in SEQ ID NO:1002, Table 15). The distal CCAAT box of HBG promoter (i.e., HBG1/2 c.-111 to -115) is indicated by a grey box. FIG. 27B shows the target region of HBG1-1, the distal CCAAT box of HBG, and the target region SpA gRNA (comprising the targeting domain of SEQ ID NO:941, Table 15). FIG. 27C shows the target region of HBG1-1, the distal CCAAT box of HBG, and the target region SpG gRNA (comprising the targeting domain of SEQ ID NO:359, Table 15). FIG. 27D shows the target region of HBG1-1, the distal CCAAT box of HBG, the target region of tSpA dead gRNA (“dgRNA”) (comprising the targeting domain of SEQ ID NO:326, Table 15), and the target region of Sp182 dgRNA (comprising the targeting domain of SEQ ID NO:1028, Table 15). FIG. 27E shows the target region of HBG1-1, the distal CCAAT box of HBG, and tSpA dgRNA (comprising the targeting domain of SEQ ID NO:326, Table 15). FIG. 27F shows the target region of HBG1-1, the distal CCAAT box of HBG, and the target region of Sp182 dgRNA (comprising the targeting domain of SEQ ID NO:1028, Table 15).

[0121] FIGS. 28A-B depict HbF expression achieved by ex vivo editing of mPB CD34+ cells using HBG1-1-AsCpf1-RNP targeting the HBG promotor region. FIG. 28A shows results of editing at the HBG promoter region following delivery of 5 μM or 20 μM HBG1-1-AsCpf1-RNP (“HBG-1-1”) via Amaxa electroporation in mPB CD34+ cells. Delivery of 20 μM HBG1-1-AsCpf1-RNP via Amaxa electroporation results in up to -43% editing, and 21% HbF induction (above background levels). HbF levels are represented by black circles depicting expression levels of gamma-globin chains over total beta-like globin chains (gamma chains/[gamma chains+beta chain]) as measured by UPLC analysis on the erythroid progeny of mPB CD34+ cells. Grey bars depict the percentage of indels 72 hours post-electroporation detected by next generation sequencing (NGS) of the HBG PCR product. FIG. 28B shows results of editing at the HBG promoter region following delivery of 5 μM or 20 μM HBG1-1-AsCpf1-RNP (“HBG-1-1”) via MaxCyte electroporation in mPB CD34+ cells. Delivery of 20 μM HBG1-1-AsCpf1-RNP via MaxCyte electroporation results in up to -16% editing, and 7% HbF induction (above background levels). HbF levels are represented by black circles depicting expression levels of gamma-globin chains over total beta-like globin chains (gamma chains/[gamma chains+beta chain]) as measured by UPLC analysis on the erythroid progeny of mPB CD34+ cells. Grey bars depict the percentage of indels 72 hours post-electroporation detected by NGS of the HBG PCR product.

[0122] FIG. 29 depicts enhanced editing by HBG1-1-AsCpf1H800A-RNP at the HBG promotor region on the Maxcyte device by co-delivering various S. Pyogenes Cas9 WT or Cas9D10A RNPs. “S.Py D10A” represents the Cas9 D10A nickase protein and “S.Py WT” represents the Cas9 WT protein. RNPs tested include SpA-D10A-RNP, SpG-D10A-RNP, tSpA-Cas9-RNP, Sp182-Cas9-RNP, and tSpA-Cas9-RNP+Sp182-Cas9-RNP (Table 14). Total editing at the HBG promoter region (grey bars) and the associated HbF protein induction (black circles) following delivery of HBG1-1-AsCpf1H800A-RNP alone (“HBG1-1”), or in combination with S. Pyogenes Cas9 RNPs or pairs of RNP, is depicted. HbF levels are represented by black circles depicting expression levels of gamma-globin chains over total beta-like globin chains (gamma chains/[gamma chains+beta chain]) as measured by UPLC analysis on the erythroid progeny of mPB CD34+ cells. Grey bars depict the percentage of indels detected by NGS of the HBG PCR product.

[0123] FIG. 30 depicts viability of mPB CD34+ cells following MaxCyte delivery of HBG1-1-AsCpf1H800A-RNP alone (“HBG1-1”) or in combination with various S. Pyogenes Cas9 WT or Cas9D10A RNPs. “S.Py D10A” represents the Cas9 D10A nickase protein and “S.Py WT” represents the Cas9 WT protein. RNPs tested include SpA-D10A-RNP, SpG-D10A-RNP, tSpA-Cas9-RNP, Sp182-Cas9-RNP, and tSpA-Cas9-RNP+Sp182-Cas9-RNP (Table 14). Viability was measured by DAPI staining and flow cytometry analysis at 24h post electroporation.

[0124] FIGS. 31A-B depict the cleavage sites of HBG1-1-AsCpf1H800A-RNP and D10A-Cas9 RNP at the target region and the editing profile resulting from the co-delivery of the HBG1-1-AsCpf1H800A-RNP with a D10A RNP. FIG. 31A depicts the position of the HBG1-1-AsCpf1H800A-RNP cut sites on each strand of the target region (light grey arrows), as well as position of the nicking site targeted by the SpG-D10A-RNP and SpA-D10A-RNP (dark arrows) (Table 14). FIG. 31B depicts the editing profile resulting from the co-delivery of the HBG1-1-AsCpf1H800A-RNP (“HBG1-1 RNP”) with either SpG-D10A-RNP (“spG RNP”) or SpA-D10A-RNP (“spA RNP”) in mPB CD34+ at 72h post-electroporation as detected by NGS analysis of the HBG PCR product (Table 14). The X-axis represents genomic position of the center of the indel relative to the HBG1-1-AsCpf1H800A-RNP positive strand cleavage site. The Y axis represents the length of the indel, where deletions are represented as negative values and insertions are represented as positive values. The total frequency of each indel is represented by the area of the symbol. Indels occurring at frequency equal or above 0.1% are depicted. The SpG and SpA target sites are indicated by dotted lines.

[0125] FIGS. 32A-B depict that the co-delivery of Sp182-Cas9-RNP with HBG1-1-AsCpf1H800A-RNP results in a boost in total indels and in distal CCAAT box disrupting indels with no substantial alteration of the indel profile, as detected by NGS analysis of the HBG PCR product at 72h post-electroporation. FIG. 32A shows the indel profiles following editing with HBG1-1-AsCpf1H800A-RNP (“HBG1-1 RNP”) alone, or in combination with Sp182-Cas9-RNP (“sp182 RNP”). The X-axis represents genomic position of the center of the indel relative to the HBG1-1-AsCpf1H800A-RNP positive strand cleavage site. The Y axis represents the length of the indel, where deletions are represented as negative values and insertions are represented as positive values. The total frequency of each indel is represented by the area of the symbol. Indels occurring at frequency equal or above 0.1% are depicted. The Sp182 target site is indicated by a dotted line. FIG. 32B depicts the frequency of indels disrupting either none, 1 nt, 2 nt, 3 nt, 4 nt, or the entire 5 nt of the distal CCAAT box sequence.

[0126] FIG. 33 depicts that optimal doses of HBG1-1-AsCpf1H800A-RNP co-delivered with Sp182-Cas9-RNP result in an increase in total editing, and HbF production (Table 14). Delivery of HBG1-1-AsCpf1H800A-RNP (“HBG1-1”) as an RNP pair alongside Sp182-Cas9-RNP (“Sp182”), achieved >92% editing (grey bars) at the HBG promoter region with up to 34% HbF induction (above background) (black circles). No editing was observed when Sp182-Cas9-RNP was delivered alone at 12 μM. HbF levels are represented by black circles depicting expression levels of gamma-globin chains over total beta-like globin chains (gamma chains/[gamma chains+beta chain]) as measured by UPLC analysis on the erythroid progeny of mPB CD34+ cells. Grey bars depict the percentage of indels detected by NGS of the HBG PCR product.

[0127] FIG. 34 depicts the distribution of levels of gamma chain expression over total beta-like chains (gamma chains/[gamma chains+beta chain]) as measured by UPLC in the clonal erythroid progeny of single human mPB CD34+ cells edited at the HBG promotor region with HBG1-1-AsCpf1H800A-RNP in combination with Sp182-Cas9-RNP (Table 14). Each black circle represents the gamma-globin protein level detected in a clonal erythroid population derived from a single cell, isolated by FACS sorting at 48h post electroporation.

[0128] FIGS. 35A-C depicts total editing, HbF production, viability, and colony forming potential after co-delivery of RNP containing modified HBG1-1 gRNA (SEQ ID NO:1041, Table 14) complexed to His-AsCpf1-sNLS-sNLS H800A (SEQ ID NO:1032, Table 14) (“His-AsCpf1-sNLS-sNLS H800A_HBG1-1 RNP,” represented as “HBG1-1” in FIGS. 35A-C) with increasing concentrations of ssODN OLI16431 (SEQ ID NO:1040, Table 11) (represented as “OLI16431” in FIGS. 35A-C) (Table 11). FIG. 35A depicts editing at the distal CAATT box (grey bars) and HbF induction (black circles) after co-delivery of 6 μM His-AsCpf1-sNLS-sNLS H800A_HBG1-1 RNP and increasing concentrations of ssODN OLI16431. HbF levels are represented by black circles depicting expression levels of gamma-globin chains over total beta-like globin chains (gamma chains/[gamma chains+beta chain]) as measured by UPLC analysis on the erythroid progeny of mPB CD34+ cells. Grey bars depict the percentage of indels detected by NGS of the HBG PCR product. FIG. 35B depicts viability of mPB CD34+ cells following delivery of His-AsCpf1-sNLS-sNLS H800A_HBG1-1 RNP alone or in combination with increasing doses of ssODN OLI16431. Viability was measured by DAPI exclusion at 72 hours post electroporation. FIG. 35C depicts the hematopoietic activity of the “HBG1-1” RNP and ssODN OLI16431 treated and donor matched untreated control CD34+ cells in colony forming cell (CFC) assays. CFCs shown are per 800 CD34+ cells plated. The number and subtype of colonies are indicated (GEMM: granulocyte-erythroid-monocyte-macrophage colony (black), GM: granulocyte-macrophage colony (dark grey), E: erythroid colony (light grey)).

[0129] FIGS. 36A-B depicts total editing, HbF production, and viability results using different concentrations of RNP containing unmodified HBG1-1 gRNA (SEQ ID NO:1022, Table 14) complexed to His-AsCpf1-sNLS-sNLS H800A (SEQ ID NO:1032, Table 14) (“His-AsCpf1-sNLS-sNLS H800A_HBG1-1 RNP,” represented as “HBG1-1” in FIGS. 36A-B) co-delivered with different concentrations of ssODN OLI16431 (SEQ ID NO:1040, Table 11) (represented as “OLI16431” in FIGS. 36A-B) (Table 11). FIG. 36A depicts editing at the distal CAATT box (black bars (48 hours) and light grey bars (14 days of erythroid culture)) and HbF induction (black circles) after co-delivery of His-AsCpf1-sNLS-sNLS H800A_HBG1-1 RNP (“HBG1-1”) and ssODN OLI16431 at varying concentrations. HbF levels are represented by black circles depicting expression levels of gamma-globin chains over total beta-like globin chains (gamma chains/[gamma chains+beta chain]) as measured by UPLC analysis on the erythroid progeny of mPB CD34+ cells. Bars depict the percentage of indels detected by NGS of the HBG PCR product at 48 hours (black) and 14 day erythroid culture (light grey) timepoints. FIG. 36B depicts viability of mPB CD34+ cells following delivery of His-AsCpf1-sNLS-sNLS H800A_HBG1-1 RNP alone (“HBG1-1”), ssODN OLI16431 alone, or in combination with varying doses of HBG1-1 and OLI16431. Viability was measured by DAPI exclusion at 48 hours post electroporation and after 14 days in erythroid culture. Following the editing of mPB CD34+ cells, ex vivo differentiation into the erythroid linage was performed for 18 days (Giarratana 2011). At day 14 of culture, a subset of cells were isolated and viability (DAPI exclusion) and editing (NGS of the HBG PCR product) measurements were taken.

[0130] FIG. 37 depicts editing by RNP in mPB CD34+ cells. RNPs included gRNA complexed with Cpf1 protein as set forth in Table 21. Illumina sequencing was performed on isolated genomic DNA at 72 hours post electroporation.

[0131] FIGS. 38A-B depict editing in bulk CD34+ cell population (black bars), progenitor cells (light grey bars), and HSCs (dark grey bars), as determined by Illumina sequencing 48 hours post electroporation. FIG. 38A depicts RNP33 (Table 21) delivered alone or co-delivered with ssODN OLI16431 (SEQ ID NO:1040, Table 11). FIG. 38B depicts RNP33 (Table 21) delivered alone or co-delivered with Sp182 RNP (dead gRNA comprising SEQ ID NO:1027 (Table 14) complexed with S. pyogenes Cas9 (SEQ ID NO:1033)).

[0132] FIG. 39 depicts editing in bulk CD34+ cell population (black bars), progenitor cells (light grey bars), and HSCs (dark grey bars), as determined by Illumina sequencing 48 hours post electroporation. RNP34, RNP33, and RNP43 (Table 21) were delivered alone or in combination with Sp182 RNP (dead gRNA comprising SEQ ID NO:1027 (Table 14) complexed with S. pyogenes Cas9 (SEQ ID NO:1033)) or ssODN OLI16431 (SEQ ID NO:1040, Table 11).

[0133] FIG. 40 depicts editing in CD34+ cells as determined by Illumina sequencing 72 hours post electroporation. RNP64, RNP63, and RNP45 (Table 21) were delivered at a stoichiometry (gRNA:Cpf1 complexation ratio) of either 2, or 4, where the gRNA is in a molar excess.

[0134] FIG. 41 depicts editing in CD34+ cells as determined by Illumina sequencing 72 hours post electroporation. RNP33, RNP64, RNP63, and RNP45 (Table 21) were delivered alone or in combination with Sp182 RNP (dead gRNA comprising SEQ ID NO:1027 (Table 14) complexed with S. pyogenes Cas9 (SEQ ID NO:1033)) or ssODN OLI16431 (SEQ ID NO:1040, Table 11).

[0135] FIG. 42 depicts editing in CD34+ cells as determined by Illumina sequencing. RNPs comprising Cpf1 (SEQ ID:1094) complexed to gRNAs with various 5′ DNA extensions (Table 21), were delivered alone or in combination with 8 μM OLI16431 (SEQ ID NO:1040, Table 11).

[0136] FIG. 43 depicts editing in CD34+ cells, as determined by Illumina sequencing. RNPs comprising gRNAs with matched 5′ ends (RNP49 vs RNP58 and RNP59 vs RNP60, Table 21) were delivered to CD34+ cells to assess the impact of 3′ modifications. In both comparisons, gRNAs with 3′ PS-OMe outperformed the unmodified 3′ version at 24 hours post electroporation.

[0137] FIGS. 44A-B depict editing in CD34+ cells as determined by Illumina sequencing 24 and 48 hours post electroporation. RNP58 (Table 21) was delivered to CD34+ cells at a stoichiometry (gRNA:Cpf1 complexation ratio) of either 2:1, 1:1 or 0.5:1 molar ratios. At all doses tested, editing was best when RNP was complexed at 2:1 ratio.

[0138] FIGS. 45A-B depict editing in CD34+ cells as determined by Illumina sequencing. FIGS. 45A and 45B depict RNPs comprising gRNAs with matched 5′ ends, but different 3′ modifications (Table 21) delivered to CD34+ cells to assess the impact of 3′ modifications or extensions.

[0139] FIGS. 46A-C depict editing in CD34+ cells and their erythroid progeny, and HbF levels in the erythroid progeny following delivery of RNPs targeting various cut sites within the HBG locus. FIG. 46A depicts RNPs comprising guide RNAs containing an unmodified 5′ and 1× PS-Ome at the 3′ end (Table 21). FIG. 46B depicts RNPs comprising guide RNAs containing 2PS+20 DNA extension at the 5′ and 1× PS-Ome at the 3′ end (Table 21). FIG. 46C depicts RNPs comprising guide RNAs containing a 25 DNA extension at the 5′ and 1× PS-Ome at the 3′ end (Table 21).

[0140] FIG. 47 depicts editing and HbF levels in erythroid progeny of CD34+ cells following delivery of RNP58 at 1 μM, 2 μM, and 4 μM.

[0141] FIG. 48 depicts editing in CD34+ cells following Maxcyte electroporation of RNPs. RNP58, RNP26, RNP27, and RNP28 comprising gRNA SEQ ID:1051 complexed to different Cpf1 proteins (SEQ IDs: 1094, 1096, 1107, 1108) (Table 21) were delivered into CD34+ cells. Editing was determined by Illumina-sequencing 24 and 48 hours post electroporation.

[0142] FIG. 49 depicts editing in CD34+ cells following Maxcyte electroporation of RNPs. RNP58, RNP29, RNP30, and RNP31 comprising Cpf1 protein SEQ ID: 1094 complexed to guide RNAs with various 5′ extensions (Table 21) were delivered into CD34+ cells. Editing was determined by Illumina-seq 24 and 48 hours post electroporation. RNP30 was not tested (nt) at 1 μM due to limiting cell numbers.

[0143] FIG. 50 depicts editing in bulk CD34+ cell population (black bars), progenitor cells (dark grey bars), and HSCs (light grey bars), as determined by Illumina sequencing 48 hours post electroporation. RNP58, RNP27, and RNP26 (Table 21) were delivered to CD34+ cells at 2 μM or 4 μM.

[0144] FIG. 51 depicts editing in bulk CD34+ cell population (black bars), progenitor cells (dark grey bars), and HSCs (light grey bars), as determined by Illumina sequencing 48 hours post electroporation. RNP61, RNP62, and RNP34 (Table 21) (8 μM) were co-delivered to CD34+ cells with ssODN OLI16431 (SEQ ID NO:1040, Table 11) (8 μM).

[0145] FIG. 52 depicts editing in bulk CD34+ cell population (black bars), progenitor cells (dark grey bars), and HSCs (light grey bars), as determined by Illumina sequencing 48 hours post electroporation. RNP58 and RNP32 (Table 21) were delivered to CD34+ cells at 2 μM.

[0146] FIG. 53 depicts editing in bulk CD34+ cell population (black bars), progenitor cells (dark grey bars), and HSCs (light grey bars), as determined by Illumina sequencing 48 hours post electroporation. RNP58 and RNP1 (Table 21) were delivered to CD34+ cells at 2 μM, 4 μM, or 8 μM. The cells edited with RNP1 at 2 μM were not sorted (N.S), and thus editing data is not available.

[0147] FIG. 54 depicts the indels of engrafted mPB CD34+ cells from BM of “NBSGW” mice 8 weeks post infusion of electroporated cells. RNP34 and RNP33 (Table 21) (8 μM) were co-delivered to CD34+ cells with ssODN OLI16431 (SEQ ID NO:1040, Table 11) (6 μM).

[0148] FIGS. 55A-B depict the indels of engrafted mPB CD34+ cells and HbF expression by erythroid cells derived from chimeric BM of “NBSGW” mice 8 weeks post infusion of electroporated cells. RNP33 or RNP34 (Table 21) was co-delivered with Sp182 RNP (dead gRNA comprising SEQ ID NO:1027 (Table 14) complexed with S. pyogenes Cas9 (SEQ ID NO:1033)) (16 μM total RNP) to CD34+ cells. FIG. 55A depicts the indel frequency in unfractionated bone marrow or flow-sorted individual populations of CD15+, CD19+, GlyA+, and Lin-CD34+ cells in mock-transfected (no RNP added) or RNP transfected cells. Lin-CD34+ cells are defined as CD34+ cells that are negative for CD3, CD14, CD15, CD16, CD19, CD20, and CD56) from bone marrow (BM) of nonirradiated NOD,B6.SCID I12rγ−/− Kit(W41/W41) (“NBSGW”) mice infused with mock (no RNP) or RNP transfected mPB CD34+ cells. Indels were determined for each cell population by Illumina sequencing. FIG. 55B depicts the HbF expression, calculated by UPLC as gamma/beta-like (%) from erythroid cell lysates following an 18-day erythroid differentiation culture from total chimeric BM.

[0149] FIGS. 56A-B depict the indels of engrafted mPB CD34+ cells and HbF expression by erythroid cells derived from chimeric BM of “NBSGW” mice 8 weeks post infusion of electroporated cells. RNP61 or RNP62 (Table 21) (8 μM) was co-delivered with ssODN OLI16431 (SEQ ID NO:1040, Table 11) (8 μM) to CD34+ cells. FIG. 56A depicts the indels of unfractionated bone marrow or flow-sorted individual populations of CD15+, CD19+, GlyA+, and Lin-CD34+ cells in mock-transfected (no RNP added) or RNP transfected cells. Lin-CD34+ cells are defined as CD34+ cells that are negative for CD3, CD14, CD15, CD16, CD19, CD20, and CD56) from bone marrow (BM) of nonirradiated NBSGW mice infused with mock (no RNP) or RNP transfected mPB CD34+ cells. Indels were determined for each cell population by Illumina sequencing. FIG. 56B depicts the HbF expression, calculated by UPLC as gamma/beta-like (%) by erythroid cells following an 18-day erythroid differentiation culture from total chimeric BM.

[0150] FIG. 57 depicts human chimerism within bone marrow 8 weeks post infusion with mock (no RNP added) mPB CD34+ cells, or mPB CD34+ cells edited with RNP1 (4 or 8 μM) or RNP58 (2, 4 or 8 μM) (table 21). Human chimerism and lineage reconstitution (CD45+, CD14+, CD19+, glycophorin A (GlyA, CD235a+), lineage, and CD34+, and mouse CD45+ marker expression) in BM was determined by flow cytometry.

[0151] FIG. 58 depicts indels within unsorted bulk bone marrow 8 weeks post infusion with mock (no RNP added) mPB CD34+ cells, or mPB CD34+ cells edited with RNP1 (4 or 8 μM) or RNP58 (2, 4 or 8 μM) (table 21). Indels were determined by Illumina sequencing.

[0152] FIG. 59 depicts the indel frequency in unfractionated bone marrow or flow-sorted individual populations of CD15+, CD19+, GlyA+, and Lin-CD34+ cells in mock-transfected (no RNP added) or RNP transfected cells. Lin-CD34+ cells are defined as CD34+ cells that are negative for CD3, CD14, CD15, CD16, CD19, CD20, and CD56 from bone marrow (BM) of nonirradiated NOD,B6.SCID II2rγ−/− Kit(W41/W41) (“NBSGW”) mice infused with mock (no RNP) or RNP transfected mPB CD34+ cells. Indels were determined for each cell population by Illumina sequencing.

[0153] FIG. 60 depicts HbF from GlyA+ fraction isolated from bone marrow at 8 weeks post infusion with mock (no RNP added) mPB CD34+ cells, or mPB CD34+ cells edited with RNP58 (2, 4 or 8 μM) (table 21).

[0154] FIG. 61 depicts colony forming potential of cells from bone marrow flushes taken 8 weeks post infusion of mock or edited human mobilized CD34+ cells. The number and subtype of colonies are indicated (GEMM: granulocyte-erythroid-monocyte-macrophage colony (black), GM: granulocyte-macrophage colony (dark grey), E: erythroid colony (light grey)).

[0155] FIG. 62 depicts the sequences of Cpf1 protein variants set forth in Table 20. Nuclear localization sequences are shown as bolded letters, six-histidine sequences are shown as underlined letters. Additional permutations of the identity and N-terminal/C-terminal positions of NLS sequences, e.g., appending two or more nNLS sequences or combinations of nNLS and sNLS sequences (or other NLS sequences) to either the N-terminal/C-terminal positions, as well as sequences with and without purification sequences, e.g., six-histidine sequences, are within the scope of the instantly disclosed subject matter.

[0156] FIGS. 63-63E depict editing in the HBG distal CCAAT box region. FIG. 63A shows a schematic of the Cpf1 (RNP34, Table 21) and SpCas9 (Sp35 RNP) cleavage sites at the HBG distal CCAAT box region. Sp35 RNP comprises Sp35 gRNA (comprising the targeting domain of SEQ ID NO:339 (i.e., CUUGUCAAGGCUAUUGGUCA (RNA)); SEQ ID NO:917 (i.e., CTTGTCAAGGCTATTGGTCA (DNA)) complexed with S. pyogenes wildtype (Wt) Cas9 protein. The dark grey jagged line with arrows marks the expected 4 nucleotide 5′ overhang after cutting with RNP34. The grey dotted line marks the expected cut site of RNP34. This is the expected cut site for any RNP containing a gRNA comprising the gRNA targeting domain sequence UAAUUUCUACUCUUGUAGAUCCUUGUCAAGGCUAUUGGUC (SEQ ID NO:1022). The Sp35 RNP expected cut site is indicated by the grey straight line with arrows.

[0157] FIG. 63B depicts the percentage of indels derived from NHEJ and MMEJ repair in the CD34+ cell population, progenitor cells, and HSCs. MMEJ indels are represented by the black striped bar and NHEJ indels are represented by the white bar. FIG. 63C and FIG. 63D depicts the G-gamma chain expression levels (percentage of G-gamma chain/[total beta-like chains]) in erythroid cells derived from mPB CD34+ cells electroporated with Sp35 RNP or RNP34+Sp182RNP; carrying indels ≤3 bp or >3 bp in length on their HBG allele encoding for G-gamma. Only clones with a monoalleleic 4.9 kb deletion (resulting in no g-gamma expression from one of the chromosome) were analyzed to ensure a single HBG allele was driving the g-gamma expression. Thus, the expression level shown represents the level of g-gamma expression by a single HBG gene, depending on the indel carried at the promoter, in cells that have the g-gamma gene on the other chromosome deleted. FIG. 63C shows the results grouped by indel ≤3 bp or >3 bp in length. FIG. 63D depicts the gamma chain expression levels (percentage of gamma chains/[total beta-like chains]) in erythroid cells derived from mPB CD34+ cells electroporated with Sp35 RNP or RNP34+Sp182 RNP producing indels ≤3 bp or >3 bp in length. The position of the deletion is indicated on the X axis. Xs indicate indels generated by Cas9 (Sp35 RNP) and circles indicate edits generated by Cpf1 (RNP34). FIG. 63E depicts the distribution of levels of gamma chain expression over total beta-like chains (gamma chains/[gamma chains+beta chain]) as measured by UPLC in the clonal erythroid progeny of single human mPB CD34+ cells edited at the HBG promotor region with spCas9 RNP “sp35” or Cpf1 RNP34 (HBG1-1-AsCpf1H800A-RNP) in combination with “booster element” Sp182-Cas9-RNP (Table 14). Each black circle represents the gamma-globin protein level detected in a clonal erythroid population derived from a single cell, isolated by FACS sorting at 48 hours post electroporation. The error bars show the median and interquartile range. “Negative” represents the “Mock” sample.

[0158] FIGS. 64A-64J depict editing via Cpf1 or SpCas9 enzyme cleavage. FIG. 64A depicts the percentage of NHEJ mediated indels at the distal CCAAT box resulting from RNP58 (Cpf1) (Table 21) or Sp35 RNP (SpCas9) editing. Indel size is indicated by the x-axis. FIG. 64B depicts the percentage of >3 bp NHEJ mediated indels, >3 bp MMEJ mediated indels, and ≤3 bp indels at the distal CCAAT box resulting from editing by Cpf1 or SpCas9 RNP. For Sp35 RNP Cas9 indels in FIG. 64B (left pie chart): NHEJ >3 bp=21.42%; ≤3 bp=48.84%; MMEJ >3 bp=29.74%. For RNP58 Cpf1 indels in FIG. 64B (right pie chart): NHEJ >3 bp=64.86%; ≤3 bp=11.11%; MMEJ >3 bp=24.02%. FIG. 64C shows the wild type (wt) allele and top 18 indels, together with their average percentages in indel for all the samples, and their corresponding final sequences after the edit. Dashes represent deleted bases and the vertical line is the cut site (see also FIG. 77A). The long dark grey line above the wt allele marks the DNA sequence of the gRNA targeting domain of the gRNA of RNP58 (i.e., CCUUGUCAAGGCUAUUGGUCA (SEQ ID NO:1254)), and the shorter black line marks the distal CCAAT box (appearing reverse complemented here). Base distances with respect to TSS are marked by arrows. The grey boxes respresent regions of homology which indicate MMEJ repair. FIG. 64D shows the wild type (wt) allele and top 18 indels, together with their average percentages in indel for all the samples, and their corresponding final sequences after the edit. Dashes represent deleted bases and the vertical line is the cut site (see also FIG. 77A). The long dark grey line above the wt allele marks the DNA sequence of the gRNA targeting domain of the gRNA of Sp35 RNP (i.e., CUUGUCAAGGCUAUUGGUCA SEQ ID NO:339), and the short black line marks the distal CCAAT box (appearing reverse complemented here). Base distances with respect to TSS are marked by arrows. The grey boxes respresent regions of homology which indicate MMEJ repair. FIG. 64E shows the percentage of bases deleted along the target region in samples edited with RNP58 or Sp35 RNP. The black line represents RNP58 editing and the dashed line represents Sp35 RNP editing. The target region DNA sequence is shown on the x axis. The grey line marks the DNA sequence of the gRNA targeting domain of the gRNA of Sp35 RNP (i.e., CUUGUCAAGGCUAUUGGUCA SEQ ID NO:339), and the short black line marks the distal CCAAT box (appearing reverse complemented here). FIG. 64F shows the normalized profiles (each with a maximum value of 1) for the detected deletions at each base on the target region in samples edited with RNP58 or Sp35 RNP. The black line represents RNP58 editing and the dashed line represents Sp35 RNP editing. The target region DNA sequence is shown on the x axis. The grey line marks the DNA sequence of the gRNA targeting domain of the gRNA of Sp35 RNP (i.e., CUUGUCAAGGCUAUUGGUCA SEQ ID NO:339), and the short black line marks the distal CCAAT box (appearing reverse complemented here). FIG. 64G shows the percentage of detected indels as a function of the deletion size (negative values on the x axis) or insertion (positive values in the x axis). The black line represents RNP58 editing and the dashed line represents Sp35 RNP editing. FIG. 64H shows the percentage of detected indels at each position in the target region. Sp35 RNP is represented by the dashed line. RNP58 is represented by the solid line. The target region DNA sequence is shown on the x axis. The gray line marks the DNA sequence of the gRNA targeting domain of the gRNA of Sp35 RNP (i.e., CUUGUCAAGGCUAUUGGUCA SEQ ID NO:339), and the short black line marks the distal CCAAT box (appearing reverse complemented here). FIG. 64I shows the frequency correlation for shared indels detected at >0.1% in either Sp35 RNP or RNP58 edited cells. FIG. 64J frequency correlation for all indels detected in at least one of the samples. Indels not detected in Sp35 RNP-edited cells are shown to the left of the vertical line at 1E-5. Indels not detected in RNP58-edited cells are shown to the bottom of the horizontal line at 1E-5. Triangles represent deletions ≤3 bp and circles represent deletions >3 bp.

[0159] FIGS. 65A-65O depict RNP32 editing resulting in long term engraftment, indel maintenance, and high HbF induction in vivo. FIG. 65A depicts the percentage of >3 bp NHEJ mediated indels, >3 bp MMEJ mediated indels, and ≤3 bp indels at the distal CCAAT box resulting from editing by RNP32 24 hours following electroporation: NHEJ >3 bp=66.10%; ≤3 bp=12.60%; MMEJ >3 bp=27.10%. FIG. 65B depicts the percentage of >3 bp NHEJ mediated indels, >3 bp MMEJ mediated indels, and <3 bp indels at the distal CCAAT box resulting from editing by RNP32 48 hours following electroporation: NHEJ >3 bp=65.30%; ≤3 bp=12.70%; MMEJ >3 bp=27.80%. FIG. 65C depicts the percentage of >3 bp NHEJ mediated indels, >3 bp MMEJ mediated indels, and <3 bp indels at the distal CCAAT box resulting from editing by RNP32 72 hours following electroporation: NHEJ >3 bp=64.70%; ≤3 bp=11.90%; MMEJ >3 bp=29.20%. FIG. 65D depicts the percentage of indels at the distal CCAAT box mediated via NHEJ repair resulting from editing by RNP32 24, 48, and 72 hours following electroporation and preinfusion. FIG. 65E depicts the percentage of indels at the distal CCAAT box mediated via NHEJ repair resulting from editing by RNP32 24 hours following electroporation and preinfusion. FIG. 65F depicts the percentage of indels at the distal CCAAT box mediated via NHEJ repair resulting from editing by RNP32 48 hours following electroporation and preinfusion. FIG. 65G depicts the percentage of indels at the distal CCAAT box mediated via NHEJ repair resulting from editing by RNP32 72 hours following electroporation and preinfusion. FIG. 65H depicts the percentage of all indels at the distal CCAAT box resulting from editing by RNP32 24, 48, and 72 hours following electroporation and preinfusion. FIG. 65I depicts the percentage of all indels at the distal CCAAT box from editing by RNP32 24 hours following electroporation and preinfusion. FIG. 65J depicts the percentage of all indels at the distal CCAAT box resulting from editing by RNP32 48 hours following electroporation and preinfusion. FIG. 65K depicts the percentage of all indels at the distal CCAAT box resulting from editing by RNP32 72 hours following electroporation and preinfusion. FIG. 65L depicts the percentage of indels in pre-infused RNP32 edited mPB CD34+ cells (“Preinfusion”) and long-term repopulating CD34+ cells from NBSGW mice following infusion of RNP32 edited mPB CD34+ cells and 16 weeks engraftment (“BM”). FIG. 65M depicts human chimerism within bone marrow 16 weeks post infusion with mock (no RNP added) mPB CD34+ cells or mPB CD34+ cells edited with RNP32 (Table 21). Human chimerism and lineage reconstitution (CD19+, CD15+, CD235A+), lineage, and CD34+, and mouse CD45+ marker expression) in BM was determined by flow cytometry. FIG. 65N depicts the percentage of F positive cells in mock (no RNP added) and CD235a+(GlyA+) erythroid cells, derived from RNP32 edited CD34+ cells. FIG. 65O depicts the percentage of HbF shown by expression levels of gamma-globin chains over total beta-like globin chains (gamma chains/[gamma chains+beta chain]) as measured by UPLC analysis of CD235a+ (GlyA+) erythroid cells.

[0160] FIGS. 66A-66B depict high polyclonality in NBSGW mice infused with RNP32 edited CD34+ cells. FIG. 66A shows high polyclonality over a 20 week period (8, 12, 16, and 20 weeks post-infusion) in the blood of mice (Mouse A, Mouse B, Mouse C, Mouse D) infused with RNP32 edited CD34+ cells. “0” represents data from pre-infused RNP32 edited mPB CD34+ cells. FIG. 66B shows high polyclonality in the bone marrow (BM) of NBSGW mice infused with RNP32 edited CD34+ cells at 20 weeks post-engraftment. In FIGS. 66A and 66B, each shade of grey within the graphical depiction represents a different indel signature, with the most frequent indel type located near the x-axis and the least frequent indel type located near the top of the plot.

[0161] FIG. 67 shows a schematic of the β-globin locus. “CD34+ cells^{a}”, means CD34+ hematopoietic stem and progenitor cells, “HS” means hypersensitive site, “LCR” means locus control region, “TSS” means transcriptional start site.

[0162] FIG. 68A shows viability of normal and SCD CD34+ cells at Days 1 to 3 post electroporation with 6 μM of RNP32 compiled from two independent experiments. Individual data points and mean for each treatment group are shown. N=4 for normal donors; N=5 for sickle donors (CEL238-001 [normal CD34+ cells] and CEL211-001 [SCD CD34+ cells] were each tested twice). FIG. 68B shows CD34+ cell viability post-electroporation with RNP32. ^{a} indicates only applicable to RNP32-electroporated cells. ^{b} indicates insufficient number of cells available and thus viability was not assessed.

[0163] FIG. 69A shows indel levels of normal and SCD CD34+ cells at Days 1 to 3 post electroporation with 6 μM of RNP32 compiled from two independent experiments. Individual data points and mean for each treatment group are shown. N=4 for normal donors; N=5 for sickle donors. (CEL238-001 [normal CD34+ cells] and CEL211-001 [SCD CD34+ cells] were each tested twice. Indel=insertions and/or deletions. FIG. 69B shows comparable and efficient editing in RNP32 edited CD34+ cells from normal donors and patients with SCD. The percentage of indels was evaluated in unedited and RNP32 edited CD34+ cells from normal donors (n=3) and from unedited and RNP32 edited CD34+ cells from patients with SCD (n=4). Unedited cells did not undergo electroporation. FIG. 69C shows indel levels of CD34+ cells post-electroporation with RNP32. ND=Not Determined (Insufficient sample to run sequencing analysis).

[0164] FIGS. 70A-70D depict PCR Primers and mixes for digital droplet polymerase chain reaction (ddPCR). FIG. 70A depicts a schematic representation of ddPCR primers and probe positions relative to RNP32 cut sites. FIG. 70B shows the primers and probe sequences for 4.9 kb fragment deletion assessment. FIG. 70C shows the Master Mix 1 and 2 compositions for ddPCR Assay 6 and 9. FIG. 70D shows the Master Mix 3 composition.

[0165] FIG. 71A shows the frequency of 4.9 kb fragment deletion of normal and SCD CD34+ cells at Day 1 post electroporation with 6 μM of RNP32. Data are from 1 study (SCD014). Each dot represents 1 sample. Untreated cells did not undergo electroporation. FIG. 71B shows the frequency of 4.9 kb deletion in CD34+ cells post-electroporation with RNP32. NA=data not available as digital droplet polymerase chain reaction assays failed. Untreated cells did not undergo electroporation.

[0166] FIG. 72A shows fold expansion of erythroid progeny of CD34+ cells. Normal and SCD CD34+ cells, either untreated or electroporated with 6 μM of RNP32, were placed in erythroid-inducing conditions for 18 days. Data were compiled from 2 independent experiments. Each dot represents 1 sample. FIG. 72B shows enucleation frequency of erythroid progeny of CD34+ cells. Normal and SCD CD34+ cells, either untreated or electroporated with 6 μM of RNP32, were placed in erythroid-inducing conditions for 18 days. Data were compiled from 2 independent experiments. Each dot represents 1 sample.

[0167] FIG. 73A shows an assessment of HbF induction in erythroid progeny in two experiments. Normal and SCD CD34+ cells, either untreated or electroporated with 6 μM of RNP32, were placed in erythroid-inducing conditions for 18 days. The relative abundance of globin chains in erythroid lysate was analyzed by RP-UPLC and HbF levels were calculated as HbF (%)=(Aγ+Gγ)/(Aγ+Gγ+β) (%).

[0168] FIG. 73B shows the frequency of HbF+RBCs evaluated by flow cytometry in one independent experiment. For FIG. 73A and FIG. 73B, each dot represents 1 sample. Paired T test was performed to determine whether the differences between RNP32-treated samples and untreated samples were statistically significant. * p<0.05, ** p<0.01, **** p<0.0001. RP-UPLC=reverse phase ultra-performance liquid chromatography. Untreated cells did not undergo electroporation. FIG. 73C shows comparable and robust ex vivo HbF expression in RNP32 edited CD34+ cells from normal donors and patients with SCD. The percentage of HbF is shown by expression levels of gamma-globin chains over total beta-like globin chains (gamma chains/[gamma chains+beta chain]) in unedited and RNP32 edited CD34+ cells from normal donors (n=3) and in unedited and RNP32 edited CD34+ cells from patients with SCD (n=4). Unedited cells did not undergo electroporation.

[0169] FIG. 74 shows RNP32 edited CD34+ derived red blood cells (RBCs) from SCD patients have reduced sickling versus unedited RBCs from SCD patients when exposed to sodium metabisulfite and examined under a microscope. The percentage of sickled RBCs is shown for unedited SCD-derived RBCs and RNP32 edited SCD-derived RBCs. The mean HbF percentage is also shown for unedited SCD-derived RBCs and RNP32 edited SCD-derived RBCs.

[0170] FIG. 75A shows a graphic representation of the measured loss of deformability, the point-of-sickling of SCD RBCs, as a result of oxygen-depletion in time, followed by subsequent gain of deformability of RBC's during reoxygenation, as is visualized on the Oxygenscan. EImax represents RBC deformability at normoxia and EImin represents deformability upon deoxygenation. The point of sickling (PoS) reflects pO2 at which sickling begins and a >5% decrease in EI is observed during deoxygenation. EI=elongation index. FIGS. 75B-75E shows the assessment of RBC deformability. Cultured RBCs from three batches of untreated normal CD34+ cells (FIG. 75B) and four batches of untreated or RNP32-edited SCD CD34+ cells (FIG. 75C) were analyzed on the Lorrca ektacytometer to measure deformability under shear stress, expressed as elongation index, when subjected to decreasing level of O2. In FIG. 75C, RBCs cultured from CD34+ cells that did not undergo electroporation with RNP32 (untreated) are represented by the black line (bottom line in all plots until at least 25 mmHg) and RBCs cultured from RNP32-edited SCD CD34+ cells are repsented by a dark gray line (top line in all plots until at least 25 mmHg). The point of sickling, representing the relative oxygen pressure when the SCD RBCs started to sickle during deoxygenation was plotted for each SCD RBC sample (FIG. 75D). The minimum elongation index of each SCD RBC sample, approximating the flexibility of RBC when deoxygenated is shown in (FIG. 75E). Each line connects the RBCs cultured from untreated and RNP32 edited cells from the same donor in the same experiment. CEL211-001 was tested twice in two independent experiments. A paired T test was performed to determine whether the differences between RBCs cultured from RNP32-treated samples and untreated samples were statistically significant. ** p<0.01, *** p<0.001.

[0171] FIG. 76A shows a rheology assessment of cultured RBCs. Untreated CD34+ cells and untreated or RNP32-electroporated SCD CD34+ cells were placed in erythroid-inducing conditions for 18 days to generate erythroid cells. Rheological behavior of cultured RBCs under varying concentrations of oxygen were evaluated using a microfluidic platform. The percentage velocity drop was calculated based on the differences between velocity at specified oxygen concentration and at atmospheric levels of oxygen (21%). Data shown are mean±standard deviation. N=5: untreated SCD samples, N=5: RNP32 treated SCD samples, N=4: untreated normal samples. Paired T test was used to compare the means between RBCs cultured from untreated and corresponding RNP32-edited SCD samples. *p<0.05, ***p<0.001, ****p<0.0001. FIG. 76B shows a summary of percentage velocity drop by varying oxygen concentration. ^{b} indicates samples clogged during assessment and experiments were aborted. Only data collected prior to the blockage formation are reported. Data are not plotted in FIG. 76A. FIG. 76C shows that RBCs cultured from RNP32-edited CD34+ cells from SCD patients have improved rheological properties, closer to RBCs from normal donors, compared to RBCs cultured from unedited CD34+ cells from SCD patients when placed in microfluidic channels that mimic blood flow in capillaries, in a range of oxygen levels. The percentage of normalized velocity was evaluated for RBCs cultured from unedited normal donor-derived CD34+ cells (diamonds), RBCs cultured from unedited SCD-donor derived CD34+ cells (triangles), and RBCs cultured from RNP32-edited SCD-derived CD34+ cells (circles) at varying percentages of oxygen. Typical oxygen levels observed in the venous circulation are between -4% to 6% oxygen. FIG. 76D shows the correlation between HbF induction and rheology behavior. The level of HbF expressed by SCD samples (x-axis) was plotted against the corresponding percentage velocity drop (y-axis) at 0%, 2%, 4% and 6% oxygen concentration. Simple linear regression analysis was performed and the coefficient of determination is shown in each panel. FIG. 76E shows HbF levels correlate with velocity for RBCs cultured from unedited SCD-derived CD34+ cells (triangles) and RBCs from RNP32-edited SCD-derived CD34+ cells (circles) when placed in microfluidic channels mimicking blood flow in capillaries at an oxygen level of 4%. The percentage of HbF is shown by expression levels of gamma-globin chains over total beta-like globin chains (gamma chains/[gamma chains+beta chain]).

[0172] FIG. 77A shows a schematic of the distal CCAAT box region with 0-based hg38 coordinates chr11:5,249,949-5,249,987 (+) in HBG1 and chr11:5,254,873-5,254,911 (+) in HBG2. The black line marks the DNA sequence of the gRNA targeting domain of the gRNA of RNP32 (i.e., CCUUGUCAAGGCUAUUGGUCA (SEQ ID NO:1254)). The black box marks the distal CCAAT box. The dark grey jagged line with arrows marks the expected 4 nucleotide 5′ overhang after cutting with RNP32. The grey dotted line marks the expected cut site of RNP32. The base before the cut site is marked with a black arrow at position -118 bases with respect to the TSS. The distances for the bases at the boundaries to the TSS are marked by black arrows at the end of the sequences (TSS: -93 and -130).

[0173] FIG. 77B shows the oligonucleotides used for sequencing the indel profiles generated by RNP32. FIG. 77C shows the amplicon used for analysis of RNP32 editing. FIG. 77D shows an example of an indel_id used to characterize the indel profile of RNP32. The Indel_id is a string identifying the indel, shown as indel_start_position+_+indel_length+_+ID. Where ID is NA for deletions and for insertions is the sequence inserted.

[0174] FIG. 78 depicts the percentage of >3 bp NHEJ mediated indels, >3 bp MMEJ mediated indels, and ≤3 bp indels at the distal CCAAT box resulting from editing by RNP32: NHEJ >3 bp=65.9%; <3 bp=8.6%; MMEJ >3 bp=25.5%.

[0175] FIG. 79 shows the wild type (wt) allele and top 20 indels, together with their average percentages in indel for all the samples, and their corresponding final sequences after the edit. Dashes represent deleted bases and the vertical line is the cut site (see also FIG. 77A). The black line marks the DNA sequence of the gRNA targeting domain of the gRNA of RNP32 (i.e., CCUUGUCAAGGCUAUUGGUCA (SEQ ID NO:1254)), and shorter black line marks the distal CCAAT box (appearing reverse complemented here). Base distances with respect to TSS are marked by arrows.

[0176] FIG. 80 shows the percentage of detected deletions as a function of the distance between the deletion center and the cut site, represented by the vertical dashed grey line taken as the middle of the 5′ overhang. The highest peak is at position −6 bp relative to the cut site (TSS: −113) and towards the TSS (see also FIG. 77A). Profiles are shown as black for normal donor samples (Normal, N=4), light grey for sickle cell donor samples (SCD, N=5) and dark grey for an additional set of normal donor samples (Normal=5, SCD1) samples. The second set of Normal samples are from study SCD1 and were mobilized with G-CSF and plerixafor and generated using the large-scale process. The black line marks the DNA sequence of the gRNA targeting domain of the gRNA of RNP32 (i.e., CCUUGUCAAGGCUAUUGGUCA (SEQ ID NO:1254)), and short black line marks the distal CCAAT box (appearing reverse complemented here).

[0177] FIG. 81 shows the percentage of detected indels as a function of the deletion size (negative values on the x axis) or insertion (positive values in the x axis). The vertical line separates insertions and deletions. The highest peak is the deletion of size 18 corresponding to the indel 159_-18_NA. Profiles are shown as black for normal donor samples (Normal, N=4), light grey for sickle cell donor samples (SCD, N=5) and dark grey for an additional set of normal donor samples (Normal=5, SCD1) samples. The second set of Normal samples are from study SCD1 and were mobilized with G-CSF and plerixafor and generated using the large-scale process.

[0178] FIG. 82 shows the average percentages for indel lengths between 50 and -50. Positive values indicate insertions. Negative values indicate deletions.

[0179] FIG. 83 shows the percentage of bases deleted along the target region in samples edited with RNP32. Profiles are shown as black for normal donor samples (Normal, N=4) and dark grey for an additional set of normal donor samples (Normal=5, SCD1) samples. The second set of Normal samples are from study SCD1 and were mobilized with G-CSF and plerixafor and generated using the large-scale process. The target region DNA sequence is shown on the x axis. The black line marks the DNA sequence of the gRNA targeting domain of the gRNA of RNP32 (i.e., CCUUGUCAAGGCUAUUGGUCA (SEQ ID NO:1254)), and short black line marks the distal CCAAT box (appearing reverse complemented here). Vertical dashed grey line represents the cut site, taken as the middle of the 5′ overhang (see also FIG. 77A).

[0180] FIG. 84 shows the normalized profiles (each with a maximum value of 1) for the detected deletions at each base on the target region in samples edited with RNP32. Profiles are shown as black for normal donor samples (Normal, N=4), light grey for sickle cell donor samples (SCD, N=5) and dark grey for an additional set of normal donor samples (Normal=5, SCD1) samples. The second set of Normal samples are from study SCD1 and were mobilized with G-CSF and plerixafor and generated using the large-scale process. The target region sequence is shown in the x axis. The black line marks the DNA sequence of the gRNA targeting domain of the gRNA of RNP32 (i.e., CCUUGUCAAGGCUAUUGGUCA (SEQ ID NO:1254)), and short black line marks the distal CCAAT box (appearing reverse complemented here). Vertical dashed grey line represents the cut site, taken as the middle of the 5′ overhang (see also FIG. 77A).

[0181] FIG. 85 shows the number of indels detected across multiple samples. Shown are the counts for the number of indels as a function of the number of samples in which the indel was detected.

[0182] FIG. 86 shows the indel reproducibility across all 14 samples as a function of their average percentage in indels. Shown are the average percentages in indel (y-axis) grouped by the number of samples in which the indel was detected (x-axis). Grey horizontal line at 0.22% marks the lowest percentage in indel of the top 55 indels.

[0183] FIGS. 87A and 87B show on-target indel levels of CD34+ cells based on RNP32 concentration at electroporation. Total on-target editing indel level was determined via Illumina sequencing at day 1 (FIG. 87A) and day 2 (FIG. 87B) after CD34+ cells were electroporated with RNP32 at the concentrations indicated. Data were compiled from eight independent experiments. A total of five RNP batches and four lots of normal donor CD34+ cells were tested across eleven concentrations of RNP32 ranging from 0.125 μM to 8 μM. Each dot represents an individual electroporation. Indel=insertions and/or deletions.

[0184] FIG. 88 shows a summary of cell viability at day 1 electroporation with RNP32. Data marked with an * indicates RNP32 found to be poorly complexed based on differential scanning fluorimetry and thus data were excluded.

[0185] FIG. 89 shows a summary of on-target indel levels at day 1 post-electroporation with RNP32. Data marked with an * indicates RNP32 found to be poorly complexed based on differential scanning fluorimetry and thus data were excluded.

[0186] FIG. 90 shows a summary of on-target indels at day 2 post-electroporation. Data marked with an * indicates RNP32 found to be poorly complexed based on differential scanning fluorimetry and thus data were excluded.

[0187] FIGS. 91A and 91B shows the frequency of 4.9 kb fragment deletion in edited CD34+ cells at day 1 and day 2 post-electroporation. Frequency of 4.9 kb fragment deletion between two RNP32 cut sites in CD34+ cells was assessed by ddPCR assays at Day 1 and Day 2 post electroporation with RNP at the concentration indicated (FIG. 91A). The 4.9 kb deletion to indel ratio was calculated by dividing levels of deletion with levels of indels for each sample (FIG. 91B). Data were compiled from three independent experiments. A total of two RNP batches and two lots of normal donor CD34+ cells were tested across eight concentrations of RNP32 ranging from 0.125 μM to 8 μM. Each dot represents an individual electroporation. Indel=insertions and/or deletions.

[0188] FIG. 92 shows the summary of 4.9 kb fragment deletion frequency at day 1 and day 2 post-electroporation with RNP32.

[0189] FIGS. 93A and 93B show on-target indel levels of subpopulations of hematopoietic stem and progenitor cells. CD34+ cells were sorted 2 days post-electroporation into subpopulations of CMP, MPP, and LT-HSC based on surface immunophenotype. FIG. 93A shows on-target indel levels determined via Illumina sequencing. The ratio of on-target indel levels within the phenotypic LT-HSC population to the total CD34⁺ cells is depicted in FIG. 93B. A ratio of 1 (dotted line) illustrates that the LT-HSCs have the same on-target indel levels as total CD34+ cells. CMP=common myeloid progenitors; Indel=insertions and/or deletions; LT-HSC=long-term hematopoietic stem cells; MPP=multipotent progenitors.

[0190] FIG. 94 shows a summary of on-target indel levels in total CD34+ cells and sorted subpopulations at day 2 post-electroporation. CMP=common myeloid progenitors; Indel=insertions and/or deletions; LT-HSC=long-term hematopoietic stem cells; MPP=multipotent progenitors.

[0191] FIGS. 95A and 95B show the frequency of 4.9 kb fragment deletion in total CD34+ cells and sorted hematopoietic stem and progenitor cell subpopulations. CD34+ cells were sorted 2 days post electroporation into subpopulations of CMP, MPP, and LT HSC based on surface immunophenotype. FIG. 95A shows the frequency of 4.9 kb deletion determined via ddPCR. The 4.9 kb deletion to indel ratio was calculated by dividing levels of deletion with levels of indels for each sample (FIG. 95B). A lower ratio depicts a lower propensity of 4.9 kb deletions to occur within a population. Multiple comparison was performed using Friedman test. *p=0.01, ****p<0.0001. CMP=common myeloid progenitors; Indel=insertions and/or deletions; LT HSC=long-term hematopoietic stem cells; MPP=multipotent progenitors.

[0192] FIG. 96 shows a summary of 4.9 kb fragment deletion frequency in total CD34+ cells and sorted subpopulations at day 2 post-electroporation with RNP32. CD34+=cluster of differentiation 34; CMP=common myeloid progenitors; Indel=insertions and/or deletions; LT-HSC=long-term hematopoietic stem cells; MPP=multipotent progenitors; RNP=ribonucleoprotein.

### DETAILED DESCRIPTION

### Definitions and Abbreviations

[0193] Unless otherwise specified, each of the following terms has the meaning associated with it in this section.

[0194] The indefinite articles “a” and “an” refer to at least one of the associated noun, and are used interchangeably with the terms “at least one” and “one or more.” For example, “a module” means at least one module, or one or more modules.

[0195] The conjunctions “or” and “and/or” are used interchangeably as non-exclusive disjunctions.

[0196] “Domain” is used to describe a segment of a protein or nucleic acid. Unless otherwise indicated, a domain is not required to have any specific functional property.

[0197] The term “exogenous trans-acting factor” refers to any peptide or nucleotide component of a genome editing system that both (a) interacts with an RNA-guided nuclease or gRNA by means of a modification, such as a peptide or nucleotide insertion or fusion, to the RNA-guided nuclease or gRNA, and (b) interacts with a target DNA to alter a helical structure thereof. Peptide or nucleotide insertions or fusions may include, without limitation, direct covalent linkages between the RNA-guided nuclease or gRNA and the exogenous trans-acting factor, and/or non-covalent linkages mediated by the insertion or fusion of RNA/protein interaction domains such as MS2 loops and protein/protein interaction domains such as a PDZ, Lim or SH1, 2 or 3 domains. Other specific RNA and amino acid interaction motifs will be familiar to those of skill in the art. Trans-acting factors may include, generally, transcriptional activators.

[0198] The term “booster element” refers to an element which, when co-delivered with a ribonucleoprotein (RNP) complex comprising a gRNA complexed to an RNA-guided nuclease (“gRNA-nuclease-RNP”), increases editing of a target nucleic acid compared with editing of the target nucleic acid without the booster element. In certain embodiments, co-delivery may be sequential or simultaneous. In certain embodiments, a booster element may be an RNP complex comprised of a dead guide RNA complexed with a WT Cas9 protein, a Cas9 nickase protein (e.g., Cas9 D10A protein), or an enzymatically inactive Cas9 (eiCas9) protein. In certain embodiments, a booster element may be an RNP complex comprised of a guide RNA complexed with a Cas9 nickase protein (e.g., Cas9 D10A protein) or an enzymatically inactive Cas9 (eiCas9) protein. In certain embodiments, a booster element may be a single- or double stranded donor template DNA. In certain embodiments, one or more booster elements may be codelivered with a gRNA-nuclease-RNP to increase editing of a target nucleic acid. In certain embodiments, a booster element may be co-delivered with an RNP comprising a gRNA complexed to a Cpf1 molecule (“gRNA-Cpf1-RNP”) to increase editing of a target nucleic acid.

[0199] “Productive indel” refers to an indel (deletion and/or insertion) that results in HbF expression. In certain embodiments, a productive indel may induce HbF expression. In certain embodiments, a productive indel may result in an increased level of HbF expression.

[0200] An “indel” is an insertion and/or deletion in a nucleic acid sequence. An indel may be the product of the repair of a DNA double strand break, such as a double strand break formed by a genome editing system of the present disclosure. An indel is most commonly formed when a break is repaired by an “error prone” repair pathway such as the NHEJ pathway described below.

[0201] “Gene conversion” refers to the alteration of a DNA sequence by incorporation of an endogenous homologous sequence (e.g. a homologous sequence within a gene array). “Gene correction” refers to the alteration of a DNA sequence by incorporation of an exogenous homologous sequence, such as an exogenous single- or double stranded donor template DNA. Gene conversion and gene correction are products of the repair of DNA double-strand breaks by HDR pathways such as those described below.

[0202] Indels, gene conversion, gene correction, and other genome editing outcomes are typically assessed by sequencing (most commonly by “next-gen” or “sequencing-by-synthesis” methods, though Sanger sequencing may still be used) and are quantified by the relative frequency of numerical changes (e.g., ±1, ±2 or more bases) at a site of interest among all sequencing reads. DNA samples for sequencing may be prepared by a variety of methods known in the art, and may involve the amplification of sites of interest by polymerase chain reaction (PCR), the capture of DNA ends generated by double strand breaks, as in the GUIDEseq process described in Tsai 2016 (incorporated by reference herein) or by other means well known in the art. Genome editing outcomes may also be assessed by in situ hybridization methods such as the FiberComb™ system commercialized by Genomic Vision (Bagneux, France), and by any other suitable methods known in the art.

[0203] “Alt-HDR,” “alternative homology-directed repair,” or “alternative HDR” are used interchangeably to refer to the process of repairing DNA damage using a homologous nucleic acid (e.g., an endogenous homologous sequence, e.g., a sister chromatid, or an exogenous nucleic acid, e.g., a template nucleic acid). Alt-HDR is distinct from canonical HDR in that the process utilizes different pathways from canonical HDR, and can be inhibited by the canonical HDR mediators, RAD51 and BRCA2. Alt-HDR is also distinguished by the involvement of a single-stranded or nicked homologous nucleic acid template, whereas canonical HDR generally involves a double-stranded homologous template.

[0204] “Canonical HDR,” “canonical homology-directed repair” or “cHDR” refer to the process of repairing DNA damage using a homologous nucleic acid (e.g., an endogenous homologous sequence, e.g., a sister chromatid, or an exogenous nucleic acid, e.g., a template nucleic acid). Canonical HDR typically acts when there has been significant resection at the double strand break, forming at least one single stranded portion of DNA. In a normal cell, cHDR typically involves a series of steps such as recognition of the break, stabilization of the break, resection, stabilization of single stranded DNA, formation of a DNA crossover intermediate, resolution of the crossover intermediate, and ligation. The process requires RAD51 and BRCA2, and the homologous nucleic acid is typically double-stranded.

[0205] Unless indicated otherwise, the term “HDR” as used herein encompasses both canonical HDR and alt-HDR.

[0206] “Non-homologous end joining” or “NHEJ” refers to ligation mediated repair and/or non-template mediated repair including canonical NHEJ (cNHEJ) and alternative NHEJ (altNHEJ), which in turn includes microhomology-mediated end joining (MMEJ), single-strand annealing (SSA), and synthesis-dependent microhomology-mediated end joining (SD-MMEJ).

[0207] “Replacement” or “replaced,” when used with reference to a modification of a molecule (e.g. a nucleic acid or protein), does not require a process limitation but merely indicates that the replacement entity is present.

[0208] “Subject” means a human, mouse, or non-human primate. A human subject can be any age (e.g., an infant, child, young adult, or adult), and may suffer from a disease, or may be in need of alteration of a gene.

[0209] “Treat,” “treating,” and “treatment” mean the treatment of a disease in a subject (e.g., a human subject), including one or more of inhibiting the disease, i.e., arresting or preventing its development or progression; relieving the disease, i.e., causing regression of the disease state; relieving one or more symptoms of the disease; and curing the disease.

[0210] “Prevent,” “preventing,” and “prevention” refer to the prevention of a disease in a subject, including (a) avoiding or precluding the disease; (b) affecting the predisposition toward the disease; or (c) preventing or delaying the onset of at least one symptom of the disease.

[0211] A “kit” refers to any collection of two or more components that together constitute a functional unit that can be employed for a specific purpose. By way of illustration (and not limitation), one kit according to this disclosure can include a guide RNA complexed or able to complex with an RNA-guided nuclease, and accompanied by (e.g. suspended in, or suspendable in) a pharmaceutically acceptable carrier. In certain embodiments, the kit may include a booster element. The kit can be used to introduce the complex into, for example, a cell or a subject, for the purpose of causing a desired genomic alteration in such cell or subject. The components of a kit can be packaged together, or they may be separately packaged. Kits according to this disclosure also optionally include directions for use (DFU) that describe the use of the kit e.g., according to a method of this disclosure. The DFU can be physically packaged with the kit, or it can be made available to a user of the kit, for instance by electronic means.

[0212] The terms “polynucleotide”, “nucleotide sequence”, “nucleic acid”, “nucleic acid molecule”, “nucleic acid sequence”, and “oligonucleotide” refer to a series of nucleotide bases (also called “nucleotides”) in DNA and RNA, and mean any chain of two or more nucleotides. The polynucleotides, nucleotide sequences, nucleic acids etc. can be chimeric mixtures or derivatives or modified versions thereof, single-stranded or double-stranded. They can be modified at the base moiety, sugar moiety, or phosphate backbone, for example, to improve stability of the molecule, its hybridization parameters, etc. A nucleotide sequence typically carries genetic information, including, but not limited to, the information used by cellular machinery to make proteins and enzymes. These terms include double- or single-stranded genomic DNA, RNA, any synthetic and genetically manipulated polynucleotide, and both sense and antisense polynucleotides. These terms also include nucleic acids containing modified bases.

[0213] Conventional IUPAC notation is used in nucleotide sequences presented herein, as shown in Table 1, below (see also Cornish-Bowden A, Nucleic Acids Res. 1985 May 10; 13(9):3021-30, incorporated by reference herein). It should be noted, however, that “T” denotes “Thymine or Uracil” in those instances where a sequence may be encoded by either DNA or RNA, for example in gRNA targeting domains.

TABLE 1
IUPAC nucleic acid notation

| Character | Base |
|---|---|
| A | Adenine |
| T | Thymine or Uracil |
| G | Guanine |
| C | Cytosine |
| U | Uracil |
| K | G or T/U |
| M | A or C |
| R | A or G |
| Y | C or T/U |
| S | C or G |
| W | A or T/U |
| B | C, G or T/U |
| V | A, C or G |
| H | A, C or T/U |
| D | A, G or T/U |
| N | A, C, G or T/U |

[0214] The terms “protein,” “peptide” and “polypeptide” are used interchangeably to refer to a sequential chain of amino acids linked together via peptide bonds. The terms include individual proteins, groups or complexes of proteins that associate together, as well as fragments or portions, variants, derivatives and analogs of such proteins. Peptide sequences are presented herein using conventional notation, beginning with the amino or N-terminus on the left, and proceeding to the carboxyl or C-terminus on the right. Standard one-letter or three-letter abbreviations can be used.

[0215] The notation “CCAAT box target region” and the like refer to a sequence that is 5′ of the transcription start site (TSS) of the HBG1 and/or HBG2 gene. CCAAT boxes are highly conserved motifs within the promoter region of α-like and β-like globin genes. The regions within or near the CCAAT box play important roles in globin gene regulation. For example, the γ-globin distal CCAAT box is associated with hereditary persistence of fetal hemoglobin. A number of transcription factors have been reported to bind to the duplicated CCAAT box region of the γ-globin promoter, e.g., NF-Y, COUP-TFII (NF-E3), CDP, GATA1/NF-E1 and DRED (Martyn 2017). While not wishing to be bound by theory, it is believed that the binding sites of the transcriptional activator NF-Y overlaps with transcriptional repressors at the γ-globin promoter. HPFH mutations present within the distal γ-globin promoter region, e.g., within or near the CCAAT box, may alter the competitive binding of those factors and thus contribute to the increased γ-globin expression and elevated levels of HbF. Genomic locations provided herein for HBG1 and HBG2 are based on the coordinates provided in NCBI Reference Sequence NC_000011, “Homo sapiens chromosome 11, GRCh38.p 12 Primary Assembly,” (Version NC_000011.10). The distal CCAAT box of HBG1 and HBG2 is positioned at HBG1 and HBG2 c.-111 to -115 (Genomic location is Hg38 Chr11:5,249,968 to Chr11:5,249,972 and Hg38 Chr11:5,254,892 to Chr11:5,254,896, respectively). The HBG1 c.-111 to -115 region is exemplified in SEQ ID NO:902 (HBG1) at positions 2823-2827, and the HBG2 c.-111 to -115 region is exemplified in SEQ ID NO:903 (HBG2) at positions 2747-2751. In certain embodiments, the “CCAAT box target region” denotes the region that is at or near the distal CCAAT box and includes the nucleotides of the distal CCAAT box and 25 nucleotides upstream (5′) and 25 nucleotides downstream (3′) of the distal CCAAT box (i.e., HBG1/2 c.-86 to -140) (Genomic location is Hg38 Chr11:5249943 to Hg38 Chr11:5249997 and Hg38 Chr11:5254867 to Hg38 Chr11:5254921, respectively). The HBG1 c.-86 to -140 region is exemplified in SEQ ID NO:902 (HBG1) at positions 2798-2852, and the HBG2 c.-86 to -140 region is exemplified in SEQ ID NO:903 (HBG2) at positions 2723-2776. In other embodiments, the “CCAAT box target region” denotes the region that is at or near the distal CCAAT box and includes the nucleotides of the distal CCAAT box and 5 nucleotides upstream (5′) and 5 nucleotides downstream (3′) of the distal CCAAT box (i.e., HBG1/2 c.-106 to -120 (Genomic location is Hg38 Chr11:5249963 to Hg38 Chr11:5249977 (HGB1 and Hg38 Chr11:5254887 to Hg38 Chr11:5254901, respectively)). The HBG1 c.-106 to -120 region is exemplified in SEQ ID NO:902 (HBG1) at positions 2818-2832, and the HBG2 c.-106 to -120 region is exemplified in SEQ ID NO:903 (HBG2) at positions 2742-2756. The term “CCAAT box target site alteration” and the like refer to alterations (e.g., deletions, insertions, mutations) of one or more nucleotides of the CCAAT box target region. Examples of exemplary CCAAT box target region alterations include, without limitation, the 1 nt deletion, 4 nt deletion, 11 nt deletion, 13 nt deletion, and 18 nt deletion, and -117 G>A alteration. As used herein, the terms “CCAAT box” and “CAAT box” can be used interchangeably.

[0216] The notations “c.-114 to -102 region,” “c.-102 to -114 region,” “−102:-114,” “13 nt target region” and the like refer to a sequence that is 5′ of the transcription start site (TSS) of the HBG1 and/or HBG2 gene at the genomic location Hg38 Chr11:5,249,959 to Hg38 Chr11:5,249,971 and Hg38 Chr11:5,254,883 to Hg38 Chr11:5,254,895, respectively. The HBG1 c.-102 to -114 region is exemplified in SEQ ID NO:902 (HBG1) at positions 2824-2836 and the HBG2 c.-102 to -114 region is exemplified in SEQ ID NO:903 (HBG2) at positions 2748-2760. The term “13 nt deletion” and the like refer to deletions of the 13 nt target region.

[0217] The notations “c.-121 to -104 region,” “c.-104 to -121 region,” “−104:-121,” “18 nt target region,” and the like refer to a sequence that is 5′ of the transcription start site (TSS) of the HBG1 and/or HBG2 gene at the genomic location Hg38 Chr11:5,249,961 to Hg38 Chr11:5,249,978 and Hg38 Chr11:5,254,885 to Hg38 Chr11: 5,254,902, respectively. The HBG1 c.-104 to -121 region is exemplified in SEQ ID NO:902 (HBG1) at positions 2817-2834, and the HBG2 c.-104 to -121 region is exemplified in SEQ ID NO:903 (HBG2) at positions 2741-2758. The term “18 nt deletion” and the like refer to deletions of the 18 nt target region.

[0218] The notations “c.-105 to -115 region,” “c.-115 to -105 region,” “−105:-115,” “II nt target region,” and the like refer to a sequence that is 5′ of the transcription start site (TSS) of the HBG1 and/or HBG2 gene at the genomic location Hg38 Chr11:5,249,962 to Hg38 Chr11:5,249,972 and Hg38 Chr11:5,254,886 to Hg38 Chr11:5,254,896, respectively. The HBG1 c.-105 to -115 region is exemplified in SEQ ID NO:902 (HBG1) at positions 2823-2833, and the HBG2 c.-105 to -115 region is exemplified in SEQ ID NO:903 (HBG2) at positions 2747-2757. The term “11 nt deletion” and the like refer to deletions of the 11 nt target region.

[0219] The notations “c.-115 to -112 region,” “c.-112 to -115 region,” “−112:-115,” “4 nt target region,” and the like refer to a sequence that is 5′ of the transcription start site (TSS) of the HBG1 and/or HBG2 gene at the genomic location Hg38 Chr11:5,249,969 to Hg38 Chr11:5,249,972 and Hg38 Chr11:5,254,893 to Hg38 Chr11:5,254,896, respectively. The HBG1 c.-112 to -115 region is exemplified in SEQ ID NO:902 at positions 2823-2826, and the HBG2 c.-112 to -115 region is exemplified in SEQ ID NO:903 (HBG2) at positions 2747-2750. The term “4 nt deletion” and the like refer to deletions of the 4 nt target region.

[0220] The notations “c.-116 region,” “HBG-116,” “1 nt target region,” and the like refer to a sequence that is 5′ of the transcription start site (TSS) of the HBG1 and/or HBG2 gene at the genomic location Hg38 Chr11:5,249,973 and Hg38 Chr11:5,254,897, respectively. The HBG1 c.-116 region is exemplified in SEQ ID NO:902 at position 2822, and the HBG2 c.-116 region is exemplified in SEQ ID NO:903 (HBG2) at position 2746. The term “1 nt deletion” and the like refer to deletions of the 1 nt target region.

[0221] The notations “c.-117 G>A region,” “HBG-117 G>A,” “-117 G>A target region” and the like refer to a sequence that is 5′ of the transcription start site (TSS) of the HBG1 and/or HBG2 gene at the genomic location Hg38 Chr11:5,249,974 to Hg38 Chr11:5,249,974 and Hg38 Chr11:5,254,898 to Hg38 Chr11:5,254,898, respectively. The HBG1 c.-117 G>A region is exemplified by a substitution from guanine (G) to adenine (A) in SEQ ID NO:902 at position 2821, and the HBG2 c.-117 G>A region is exemplified by a substitution from G to A in SEQ ID NO:903 (HBG2) at position 2745. The term “-117 G>A alteration” and the like refer to a substitution from G to A at the -117G>A target region.

[0222] The term “proximal HBG1/2 promoter target sequence” denotes the region within 50, 100, 200, 300, 400, or 500 bp of a proximal HBG1/2 promoter sequence including the 13 nt target region. Alterations by genome editing systems according to this disclosure facilitate (e.g. cause, promote or tend to increase the likelihood of) upregulation of HbF production in erythroid progeny.

[0223] The term “GATA1 binding motif in BCL11Ae” refers to the sequence that is the GATA1 binding motif in the erythroid specific enhancer of BCL11A (BCL11Ae) that is in the +58 DNase I hypersensitive site (DHS) region of intron 2 of the BCL11A gene. The genomic coordinates for the GATA1 binding motif in BCL11Ae are chr2: 60,495,265 to 60,495,270. The +58 DHS site comprises a 115 base pair (bp) sequence as set forth in SEQ ID NO:968. The +58 DHS site sequence, including ˜500 bp upstream and ˜200 bp downstream is set forth in SEQ ID NO:969.

[0224] Where ranges are provided herein, endpoints are included. Furthermore, it is to be understood that unless otherwise indicated or otherwise evident from the context and/or the understanding of one of ordinary skill in the art, values that are expressed as ranges can assume any specific value within the stated ranges in different embodiments of the invention, to the tenth of the unit of the lower limit of the range, unless the context clearly dictates otherwise. It is also to be understood that unless otherwise indicated or otherwise evident from the context and/or the understanding of one of ordinary skill in the art, values expressed as ranges can assume any subrange within the given range, wherein the endpoints of the subrange are expressed to the same degree of accuracy as the tenth of the unit of the lower limit of the range.

### Overview

[0225] The various embodiments of this disclosure generally relate to genome editing systems configured to introduce alterations (e.g., a deletion or insertion, or other mutation) into chromosomal DNA that enhance transcription of the HBG1 and/or HBG2 genes, which encode the Aγ and Gγ subunits of hemoglobin, respectively. In certain embodiments, increased expression of one or more γ-globin genes (e.g., HBG1, HBG2) using the methods provided herein results in preferential formation of HbF over HbA and/or increased HbF levels as a percentage of total hemoglobin. In certain embodiments, the disclosure generally relates to the use of RNP complexes comprising a gRNA complexed to a Cpf1 molecule. In certain embodiments, the gRNA may be unmodified or modified, the Cpf1 molecule may be a wild-type Cpf1 protein or a modified Cpf1 protein. In certain embodiments, the gRNA may comprise a sequence set forth in Table 13, Table 18, or Table 19. In certain embodiments, a modified Cpf1 may be encoded by a sequence set forth in SEQ ID NOs:1000, 1001, 1008-1018, 1032, 1035-39, 1094-1097, 1107-09 (Cpf1 polypeptide sequences) or SEQ ID NOs:1019-1021, 1110-17 (Cpf1 polynucleotide sequences). In certain embodiments, the RNP complex may comprise an RNP complex set forth in Table 21. For example, the RNP complex may include a gRNA comprising the sequence set forth in SEQ ID NO:1051 and a modified Cpf1 protein encoded by the sequence set forth in SEQ ID NO:1097 (RNP32, Table 21).

[0226] It has previously been shown that patients with the condition Hereditary Persistence of Fetal Hemoglobin (HPFH) contain mutations in an γ-globin regulatory element that results in fetal γ-globin expression throughout life, rather than being repressed around the time of birth (Martyn 2017). This results in elevated fetal hemoglobin (HbF) expression. HPFH mutations may be deletional or non-deletional (e.g., point mutations). Subjects with HPFH exhibit lifelong expression of HbF, i.e., they do not undergo or undergo only partial globin switching, with no symptoms of anemia.

[0227] HbF expression can be induced through point mutations in an γ-globin regulatory element that is associated with a naturally occurring HPFH variant, including, for example, HBG1 c.-114 C>T; c.-117 G>A; c.-158 C>T; c.-167 C>T; c.-170 G>A; c.-175 T>G; c.-175 T>C; c.-195 C>G; c.-196 C>T; c.-197 C>T; c.-198 T>C; c.-201 C>T; c.-202 C>T; c.-211 C>T, c.-251 T>C; or c.-499 T>A; or HBG2 c.-109 G>T; c.-110 A>C; c.-114 C>A; c.-114 C>T; c.-114 C>G; c.-157 C>T; c.-158 C>T; c.-167 C>T; c.-167 C>A; c.-175 T>C; c.-197 C>T; c.-200+C; c.-202 C>G; c.-211 C>T; c.-228 T>C; c.-255 C>G; c.-309 A>G; c.-369 C>G; or c.-567 T>G.

[0228] Naturally occurring mutations at the distal CCAAT box motif found within the promoter of the HBG1 and/or HBG2 genes (i.e., HBG1/2 c.-111 to -115) have also been shown to result in continued γ-globin expression and the HPFH condition. It is thought that alteration (mutation or deletion) of the CCAAT box may disrupt the binding of one or more transcriptional repressors, resulting in continued expression of the γ-globin gene and elevated HbF expression (Martyn 2017). For example, a naturally occurring 13 base pair del c.-114 to -102 (“13 nt deletion”) has been shown to be associated with elevated levels of HbF (Martyn 2017). The distal CCAAT box likely overlaps with the binding motifs within and surrounding the CCAAT box of negative regulatory transcription factors that are expressed in adulthood and repress HBG (Martyn 2017).

[0229] A gene editing strategy disclosed herein is to increase HbF expression by disrupting one or more nucleotides in the distal CCAAT box and/or surrounding the distal CCAAT box. In certain embodiments, the “CCAAT box target region” may be the region that is at or near the distal CCAAT box and includes the nucleotides of the distal CCAAT box and 25 nucleotides upstream (5′) and 25 nucleotides downstream (3′) of the distal CCAAT box (i.e., HBG1/2 c.-86 to -140). In other embodiments, the “CCAAT box target region” may be the region that is at or near the distal CCAAT box and includes the nucleotides of the distal CCAAT box and 5 nucleotides upstream (5′) and 5 nucleotides downstream (3′) of the distal CCAAT box (i.e., HBG1/2 c.-106 to -120). Unique, non-naturally occurring alterations of the CCAAT box target region are disclosed herein that induce HBG expression including, without limitation, HBG del c. -104 to -121 (“18 nt deletion”), HBG del c.-105 to -115 (“11 nt deletion”), HBG del c.-112 to -115 (“4 nt deletion”), and HBG del c.-116 (“1 nt deletion”). In certain embodiments, genome editing systems disclosed herein may be used to introduce alterations into the CCAAT box target region of HBG1 and/or HBG2. In certain embodiments, the genome editing systems may include one or more of a DNA donor template that encodes an alteration (such as a deletion, insertion, or mutation) in the CCAAT box target region. In certain embodiments, the alterations may be non-naturally occurring alterations or naturally occurring alterations. In certain embodiments, the donor templates may encode the 1 nt deletion, 4 nt deletion, 11 nt deletion, 13 nt deletion, 18 nt deletion, or c.-117 G>A alteration. In certain embodiments, the genome editing systems may include an RNA guided nuclease including a Cas9, modified Cas 9, a Cpf1, or modified Cpf1. In certain embodiments, the genome editing systems may include an RNP comprising a gRNA and a Cpf1 molecule. In certain embodiments, a gRNA may be unmodified or modified, the Cpf1 molecule may be a wild-type Cpf1 protein or a modified Cpf1 protein, or a combination thereof. In certain embodiments, the gRNA may comprise a sequence set forth in Table 13, Table 18, or Table 19. In certain embodiments, a modified Cpf1 may be encoded by a sequence set forth in SEQ ID NOs:1000, 1001, 1008-1018, 1032, 1035-39, 1094-1097, 1107-09 (Cpf1 polypeptide sequences) or SEQ ID NOs:1019-1021, 1110-17 (Cpf1 polynucleotide sequences). In certain embodiments, the RNP complex may comprise an RNP complex set forth in Table 21. For example, the RNP complex may include a gRNA comprising the sequence set forth in SEQ ID NO:1051 and a modified Cpf1 protein encoded by the sequence set forth in SEQ ID NO:1097 (RNP32, Table 21).

[0230] HbF expression can also be induced through targeted disruption of the erythroid cell specific expression of a transcriptional repressor, BCL11A, which encodes a repressor that silences HBG1 and HBG2 (Canvers 2015). Another gene editing strategy disclosed herein is to increase HbF expression by targeting disruption the of the erythroid specific enhancer of BCL11A (BCL11Ae) (also discussed in commonly-assigned International Patent Publication No. WO 2015/148860 by Friedland et al. (“Friedland”), published Oct. 1, 2015, which is incorporated by reference in its entirety herein). In certain embodiments, the region of BCL11Ae targeted for disruption may be the GATA1 binding motif in BCL11Ae. In certain embodiments, genome editing systems disclosed herein may be used to introduce alterations into the GATA1 binding motif in BCL11Ae, the CCAAT box target region, the 13 nt target region of HBG1 and/or HBG2, or a combination thereof.

[0231] The genome editing systems of this disclosure can include an RNA-guided nuclease such as Cas9 or Cpf1 and one or more gRNAs having a targeting domain that is complementary to a sequence in or near the target region, and optionally one or more of a DNA donor template that encodes a specific mutation (such as a deletion or insertion) in or near the target region, and/or an agent that enhances the efficiency with which such mutations are generated including, without limitation, a random oligonucleotide, a small molecule agonist or antagonist of a gene product involved in DNA repair or a DNA damage response, or a peptide agent.

[0232] A variety of approaches to the introduction of mutations into the CCAAT box target region, 13 nt target region, proximal HBG1/2 promoter target sequence, and/or the GATA1 binding motif in BCL11Ae may be employed in the embodiments of the present disclosure. In one approach, a single alteration, such as a double-strand break, is made within the CCAAT box target region, 13 nt target region, proximal HBG1/2 promoter target sequence, and/or the GATA1 binding motif in BCL11Ae, and is repaired in a way that disrupts the function of the region, for example by the formation of an indel or by the incorporation of a donor template sequence that encodes the deletion of the region. In a second approach, two or more alterations are made on either side of the region, resulting in the deletion of the intervening sequence, including the CCAAT box target region, 13 nt target region and/or the GATA1 binding motif in BCL11Ae.

[0233] The treatment of hemoglobinopathies by gene therapy and/or genome editing is complicated by the fact that the cells that are phenotypically affected by the disease, erythrocytes or RBCs, are enucleated, and do not contain genetic material encoding either the aberrant hemoglobin protein (Hb) subunits nor the Aγ or Gγ subunits targeted in the exemplary genome editing approaches described above. This complication is addressed, in certain embodiments of this disclosure, by the alteration of cells that are competent to differentiate into, or otherwise give rise to, erythrocytes. Cells within the erythroid lineage that are altered according to various embodiments of this disclosure include, without limitation, hematopoietic stem and progenitor cells (HSCs), erythroblasts (including basophilic, polychromatic and/or orthochromatic erythroblasts), proerythroblasts, polychromatic erythrocytes or reticulocytes, embryonic stem (ES) cells, and/or induced pluripotent stem (iPSC) cells. These cells may be altered in situ (e.g. within a tissue of a subject) or ex vivo. Implementations of genome editing systems for in situ and ex vivo alteration of cells is described under the heading “Implementation of genome editing systems: delivery, formulations, and routes of administration” below.

[0234] In certain embodiments, alterations that result in induction of Aγ and/or Gγ expression are obtained through the use of a genome editing system comprising an RNA-guided nuclease and at least one gRNA having a targeting domain complementary to a sequence within the CCAAT box target region of HBG1 and/or HBG2 or proximate thereto (e.g., within 10, 20, 30, 40, or 50, 100, 200, 300, 400 or 500 bases of the CCAAT box target region). As is discussed in greater detail below, the RNA-guided nuclease and gRNA form a complex that is capable of associating with and altering the CCAAT box target region or a region proximate thereto. Examples of suitable gRNAs and gRNA targeting domains directed to the CCAAT box target region of HBG1 and/or HBG2 or proximate thereto for use in the embodiments disclosed herein include, without limitation, those set forth in SEQ ID NOs:251-901, 940-942, 970, 971, 996, 997, 1002, and 1004.

[0235] In certain embodiments, alterations that result in induction of Aγ and/or Gγ expression are obtained through the use of a genome editing system comprising an RNA-guided nuclease and at least one gRNA having a targeting domain complementary to a sequence within the 13 nt target region of HBG1 and/or HBG2 or proximate thereto (e.g., within 10, 20, 30, 40, or 50, 100, 200, 300, 400 or 500 bases of the 13 nt target region). As is discussed in greater detail below, the RNA-guided nuclease and gRNA form a complex that is capable of associating with and altering the 13 nt target region or a region proximate thereto. Examples of suitable gRNAs and gRNA targeting domains directed to the 13 nt target region of HBG1 and/or HBG2 or proximate thereto for use in the embodiments disclosed herein include, without limitation, those set forth in SEQ ID NOs:251-901, 940-942, 970, 971, 996, 997, 1002, and 1004.

[0236] In certain embodiments, alterations that result in induction of HbF expression are obtained through the use of a genome editing system comprising an RNA-guided nuclease and at least one gRNA having a targeting domain complementary to a sequence within the GATA1 binding motif in BCL11Ae or proximate thereto (e.g., within 10, 20, 30, 40, or 50, 100, 200, 300, 400 or 500 bases of the GATA1 binding motif in BCL11Ae). In certain embodiments, the RNA-guided nuclease and gRNA form a complex that is capable of associating with and altering the GATA1 binding motif in BCL11Ae. Examples of suitable targeting domains directed to the GATA1 binding motif in BCL11Ae for use in the embodiments disclosed herein include, without limitation, those set forth in SEQ ID NOs:952-955.

[0237] The genome editing system can be implemented in a variety of ways, as is discussed below in detail. As an example, a genome editing system of this disclosure can be implemented as a ribonucleoprotein complex or a plurality of complexes in which multiple gRNAs are used. This ribonucleoprotein complex can be introduced into a target cell using art-known methods, including electroporation, as described in commonly-assigned International Patent Publication No. WO 2016/182959 by Jennifer Gori (“Gori”), published Nov. 17, 2016, which is incorporated by reference in its entirety herein.

[0238] The ribonucleoprotein complexes within these compositions are introduced into target cells by art-known methods, including without limitation electroporation (e.g. using the Nucleofection™ technology commercialized by Lonza, Basel, Switzerland or similar technologies commercialized by, for example, Maxcyte Inc. Gaithersburg, Maryland) and lipofection (e.g. using Lipofectamine™ reagent commercialized by Thermo Fisher Scientific, Waltham Massachusetts). Alternatively, or additionally, ribonucleoprotein complexes are formed within the target cells themselves following introduction of nucleic acids encoding the RNA-guided nuclease and/or gRNA. These and other delivery modalities are described in general terms below and in Gori.

[0239] Cells that have been altered ex vivo according to this disclosure can be manipulated (e.g. expanded, passaged, frozen, differentiated, de-differentiated, transduced with a transgene, etc.) prior to their delivery to a subject. The cells are, variously, delivered to a subject from which they are obtained (in an “autologous” transplant), or to a recipient who is immunologically distinct from a donor of the cells (in an “allogeneic” transplant).

[0240] In some cases, an autologous transplant includes the steps of obtaining, from the subject, a plurality of cells, either circulating in peripheral blood, or within the marrow or other tissue (e.g. spleen, skin, etc.), and manipulating those cells to enrich for cells in the erythroid lineage (e.g. by induction to generate iPSCs, purification of cells expressing certain cell surface markers such as CD34, CD90, CD49f and/or not expressing surface markers characteristic of non-erythroid lineages such as CD10, CD14, CD38, etc.). The cells are, optionally or additionally, expanded, transduced with a transgene, exposed to a cytokine or other peptide or small molecule agent, and/or frozen/thawed prior to transduction with a genome editing system targeting the CCAAT box target region, the 13 nt target region, proximal HBG1/2 promoter target sequence, and/or the GATA1 binding motif in BCL11Ae. The genome editing system can be implemented or delivered to the cells in any suitable format, including as a ribonucleoprotein complex, as separated protein and nucleic acid components, and/or as nucleic acids encoding the components of the genome editing system.

[0241] In certain embodiments, CD34+ hematopoietic stem and progenitor cells (HSPCs) that have been edited using the genome editing methods disclosed herein may be used for the treatment of a hemoglobinopathy in a subject in need thereof. In certain embodiments, the hemoglobinopathy may be severe sickle cell disease (SCD) or thalassemia, such as β-thalassemia, δ-thalassemia, or β/δ-thalassemia. In certain embodiments, an exemplary protocol for treatment of a hemoglobinopathy may include harvesting CD34+HSPCs from a subject in need thereof, ex vivo editing of the autologous CD34+HSPCs using the genome editing methods disclosed herein, followed by reinfusion of the edited autologous CD34+HSPCs into the subject. In certain embodiments, treatment with edited autologous CD34+HSPCs may result in increased HbF induction.

[0242] Prior to harvesting CD34+HSPCs, in certain embodiments, a subject may discontinue treatment with hydroxyurea, if applicable, and receive blood transfusions to maintain sufficient hemoglobin (Hb) levels. In certain embodiments, a subject may be administered intravenous plerixafor (e.g., 0.24 mg/kg) to mobilize CD34+HSPCs from bone marrow into peripheral blood. In certain embodiments, a subject may undergo one or more leukapheresis cycles (e.g., approximately one month between cycles, with one cycle defined as two plerixafor-mobilized leukapheresis collections performed on consecutive days). In certain embodiments, the number of leukapheresis cycles performed for a subject may be the number required to achieve a dose of edited autologous CD34+HSPCs (e.g., ≥2×10⁶ cells/kg, ≥3×10⁶ cells/kg, ≥4×10⁶ cells/kg, ≥5×10⁶ cells/kg, 2×10⁶ cells/kg to 3×10⁶ cells/kg, 3×10⁶ cells/kg to 4×10⁶ cells/kg, 4×10⁶ cells/kg to 5×10⁶ cells/kg) to be reinfused back into the subject, along with a dose of unedited autologous CD34+HSPCs/kg for backup storage (e.g., >1.5×10⁶ cells/kg). In certain embodiments, the CD34+HSPCs harvested from the subject may be edited using any of the genome editing methods discussed herein. In certain embodiments, any one or more of the gRNAs and one or more of the RNA-guided nucleases disclosed herein may be used in the genome editing methods.

[0243] In certain embodiments, the treatment may include an autologous stem cell transplant. In certain embodiments, a subject may undergo myeloablative conditioning with busulfan conditioning (e.g., dose-adjusted based on first-dose pharmacokinetic analysis, with a test dose of 1 mg/kg). In certain embodiments, conditioning may occur for four consecutive days. In certain embodiments, following a three-day busulfan washout period, edited autologous CD34+HSPCs (e.g., ≥2×10⁶ cells/kg, ≥3×10⁶ cells/kg, ≥4×10⁶ cells/kg, ≥5×10⁶ cells/kg, 2×10⁶ cells/kg to 3×10⁶ cells/kg, 3×10⁶ cells/kg to 4×10⁶ cells/kg, 4×10⁶ cells/kg to 5×10⁶ cells/kg) may be reinfused into the subject (e.g., into peripheral blood). In certain embodiments, the edited autologous CD34+HSPCs may be manufactured and cryopreserved for a particular subject. In certain embodiments, a subject may attain neutrophil engraftment following a sequential myeloablative conditioning regimen and infusion of edited autologous CD34+ cells. Neutrophil engraftment may be defined as three consecutive measurements of ANC≥0.5×10⁹/L.

[0244] However it is implemented, a genome editing system may include, or may be co-delivered with, one or more factors that improve the viability of the cells during and after editing, including without limitation an aryl hydrocarbon receptor antagonist such as StemRegenin-1 (SR1), UM171, LGC0006, alpha-napthoflavone, and CH-223191, and/or an innate immune response antagonist such as cyclosporin A, dexamethasone, reservatrol, a MyD88 inhibitory peptide, an RNAi agent targeting Myd88, a B18R recombinant protein, a glucocorticoid, OxPAPC, a TLR antagonist, rapamycin, BX795, and a RLR shRNA. These and other factors that improve the viability of the cells during and after editing are described in Gori, under the heading “I. Optimization of Stem Cells” from page 36 through page 61, which is incorporated by reference herein.

[0245] The cells, following delivery of the genome editing system, are optionally manipulated e.g. to enrich for HSCs and/or cells in the erythroid lineage and/or for edited cells, to expand them, freeze/thaw, or otherwise prepare the cells for return to the subject. The edited cells are then returned to the subject, for instance in the circulatory system by means of intravenous delivery or delivery or into a solid tissue such as bone marrow.

[0246] Functionally, alteration of the CCAAT box target region, 13 nt target region, proximal HBG1/2 promoter target sequence, and/or the GATA1 binding motif in BCL11Ae using the compositions, methods and genome editing systems of this disclosure results in significant induction, among hemoglobin-expressing cells, of Aγ and/or Gγ subunits (referred to interchangeably as HbF expression), e.g. at least 5%, 10%, 15%, 20%, 25%, 30%, 35%, 40%, 45%, 50% or greater induction of Aγ and/or Gγ subunit expression relative to unmodified controls. This induction of protein expression is generally the result of alteration of the CCAAT box target region, 13 nt target region, proximal HBG1/2 promoter target sequence, and/or the GATA1 binding motif in BCL11Ae (expressed, e.g. in terms of the percentage of total genomes comprising indel mutations within the plurality of cells) in some or all of the plurality of cells that are treated, e.g. at least 5%, 10%, 15%, 20%, 25%, 30%, 35%, 40%, 45%, 50% of the plurality of cells comprise at least one allele comprising a sequence alteration, including, without limitation, an indel, insertion, or deletion in or near the CCAAT box target region, 13 nt target region, proximal HBG1/2 promoter target sequence, and/or the GATA1 binding motif in BCL11Ae.

[0247] The functional effects of alterations caused or facilitated by the genome editing systems and methods of the present disclosure can be assessed in any number of suitable ways. For example, the effects of alterations on expression of fetal hemoglobin can be assessed at the protein or mRNA level. Expression of HBG1 and HBG2 mRNA can be assessed by digital droplet PCR (ddPCR), which is performed on cDNA samples obtained by reverse transcription of mRNA harvested from treated or untreated samples. Primers for HBG1, HBG2, HBB, and/or HBA may be used individually or multiplexed using methods known in the art. For example, ddPCR analysis of samples may be conducted using the QX200™ ddPCR system commercialized by Bio Rad (Hercules, CA), and associated protocols published by BioRad. Fetal hemoglobin protein may be assessed by high pressure liquid chromatography (HPLC), for example, according to the methods discussed on pp. 143-44 in Chang 2017 (incorporated by reference herein), or fast protein liquid chromatography (FPLC), using ion-exchange and/or reverse phase columns to resolve HbF, HbB and HbA and/or Aγ and Gγ globin chains as is known in the art.

[0248] It should be noted that the rate at which the CCAAT box target region (e.g., 18 nt, 11 nt, 4 nt, 1 nt, c.-117 G>A target regions), 13 nt target region, proximal HBG1/2 promoter target sequence, and/or the GATA1 binding motif in BCL11Ae is altered in the target cells can be modified by the use of optional genome editing system components such as oligonucleotide donor templates. Donor template design is described in general terms below under the heading “Donor template design.” Donor templates for use in targeting the 13 nt target region may include, without limitation, donor templates encoding alterations (e.g., deletions) of HBG1 c.-114 to -102 (corresponding to nucleotides 2824-2836 of SEQ ID NO: 902), HBG1 c.-225 to -222 (corresponding to nucleotides 2716-2719 of SEQ ID NO:902)), and/or HBG2 c.-114 to -102 (corresponding to nucleotides 2748-2760 of SEQ ID NO:903). Exemplary 5′ and 3′ homology arms, and exemplary full-length donor templates encoding deletions such as c. -114 to -102 are also presented below (SEQ ID NOS: 904-909). In certain embodiments, donor templates for use in targeting the 18 nt target region may include, without limitation, donor templates encoding alterations (e.g., deletions) of HBG1 c.-104 to -121, HBG2 c.-104 to -121, or a combination thereof. Exemplary full-length donor templates encoding deletions such as c.-104 to -121 include SEQ ID NOs:974 and 975. In certain embodiments, donor templates for use in targeting the 11 nt target region may include, without limitation, donor templates encoding alterations (e.g., deletions) of HBG1 c.-105 to -115, HBG2 c.-105 to -115, or a combination thereof. Exemplary full-length donor templates encoding deletions such as c.-105 to -115 include SEQ ID NOs:976 and 978. In certain embodiments, donor templates for use in targeting the 4 nt target region may include, without limitation, donor templates encoding alterations (e.g., deletions) of HBG1 c.-112 to -115, HBG2 c.-112 to -115, or a combination thereof. Exemplary full-length donor templates encoding deletions such as c.-112 to -115 include SEQ ID NOs:984-995. In certain embodiments, donor templates for use in targeting the 1 nt target region may include, without limitation, donor templates encoding alterations (e.g., deletions) of HBG1 c.-116, HBG2 c.-116, or a combination thereof. Exemplary full-length donor templates encoding deletions such as c.-116 include SEQ ID NOs:982 and 983. In certain embodiments, donor templates for use in targeting the c.-117 G>A target region may include, without limitation, donor templates encoding alterations (e.g., deletions) of HBG1 c.-117 G>A, HBG2 c.-117 G>A, or a combination thereof. Exemplary full-length donor templates encoding deletions such as c.-117 G>A include SEQ ID NOs:980 and 981. In certain embodiments, the donor template may be a positive strand or a negative strand.

[0249] Donor templates used herein may be non-specific templates that are non-homologous to regions of DNA within or near the target sequence. In certain embodiments, donor templates for use in targeting the 13 nt target region may include, without limitation, non-target specific templates that are nonhomologous to regions of DNA within or near the 13 nt target region. For example, a non-specific donor template for use in targeting the 13 nt target region may be non-homologous to the regions of DNA within or near the 13 nt target region and may comprise a donor template encoding the deletion of HBG1 c.-225 to -222 (corresponding to nucleotides 2716-2719 of SEQ ID NO:902). In certain embodiments, donor templates for use in targeting the GATA1 binding motif in BCL11Ae may include, without limitation, non-target specific templates that are nonhomologous to regions of DNA within or near GATA1 binding motif in BCL11Ae target sequence. Other donor templates for use in targeting BCL11Ae may include, without limitation, donor templates including alterations (e.g., deletions) of BCL11Ae, including, without limitation, the GATA1 motif in BCL11Ae.

[0250] The embodiments described herein may be used in all classes of vertebrate including, but not limited to, primates, mice, rats, rabbits, pigs, dogs, and cats.

[0251] This overview has focused on a handful of exemplary embodiments that illustrate the principles of genome editing systems and CRISPR-mediated methods of altering cells. For clarity, however, this disclosure encompasses modifications and variations that have not been expressly addressed above, but will be evident to those of skill in the art. With that in mind, the following disclosure is intended to illustrate the operating principles of genome editing systems more generally. What follows should not be understood as limiting, but rather illustrative of certain principles of genome editing systems and CRISPR-mediated methods utilizing these systems, which, in combination with the instant disclosure, will inform those of skill in the art about additional implementations and modifications that are within its scope.

### RNA-Guided Helicases, Guide RNAs and Dead Guide RNAs

[0252] Various embodiments of the present disclosure also generally relate to genome editing systems configured to alter the helical structure of a nucleic acid to enhance genome editing of a target region (e.g., the CCAAT box target region, 13 nt target region, proximal HBG1/2 promoter target sequence, and/or the GATA1 binding motif in BCL11Ae) in the nucleic acid, and methods and compositions thereof. Many embodiments relate to the observation that positioning an event that alters the helical structure of DNA within or adjacent to target regions in nucleic acid may improve the activity of genome editing systems directed to such target regions. Without wishing to be bound by any theory, it is thought that alterations of helical structure (e.g., by unwinding) within or proximal to DNA target regions may induce or increase accessibility of a genome editing system to the target region, resulting in increased editing of the target regions by the genome editing system.

[0253] CRISPR nucleases evolved primarily to defend bacteria against viral pathogens, whose genomes are not naturally organized into chromatin. By contrast, when eukaryotic genomes are organized into nucleosomal units comprising genomic DNA segments coiled around histones. CRISPR nucleases from several bacterial families have been found to be inactive for editing eukaryotic DNA, suggesting the ability to edit nucleosome-bound DNA might differ across enzymes (Ran 2015). Biochemical evidence shows that S. pyogenes Cas9 can cleave DNA efficiently at nucleosome edges, but has reduced activity when the target site is positioned near the center of nucleosome dyad (Hinz 2016).

[0254] In many cell types, target sites of interest may be strongly bound by nucleosomes, or may only possess adjacent PAMs for enzymes that do not edit efficiently in the presence of nucleosomes. In this case, the problematic nucleosomes could be displaced first by using adjacent target sites that are closer to the nucleosome edge or are bound by an enzyme that is more effective at binding nucleosomal DNA. However, cleavage at these adjacent sites could be detrimental to the therapeutic strategy. Therefore, having a programmable enzyme that binds these adjacent sites but does not cleave can enable more efficient functional editing.

[0255] A related strategy utilizes recruitment of exogenous trans-acting factors to facilitate nucleosome displacement. However, the systems and methods of this disclosure are advantageous over this strategy because they do not require gRNA modifications beyond truncation of the targeting domain, do not require the recruitment of exogenous trans-acting factors, and do not require transcriptional activation to achieve increased rates of editing.

[0256] A variety of approaches to the unwinding and alteration of nucleic acid are employed in the various embodiments of this disclosure. One approach comprises unwinding (or opening of) a chromatin segment within or proximal to a target region (e.g., the CCAAT box target region, 13 nt target region, proximal HBG1/2 promoter target sequence, and/or the GATA1 binding motif in BCL11Ae) of a nucleic acid in a cell and generating a double stranded break (DSB) within the target region of the nucleic acid whereby the target region is altered. In certain embodiments, the DSB may be repaired in a manner that alters the target region. Unwinding the chromatin segment using the methods provided herein may facilitate increased access of catalytically active RNPs (e.g., catalytically active RNA-guided nucleases and gRNAs) to the chromatin to allow for more efficient editing of the DNA. For example, these methods may be used to edit target regions in chromatin that are difficult for a ribonucleoprotein (e.g., RNA-guided nuclease complexed to gRNA) to access because the chromatin is occupied by nucleosomes, such as closed chromatin. In certain embodiments, the unwinding of the chromatin segment occurs via RNA-guided helicase activity. In certain embodiments, the unwinding step does not require recruiting an exogenous trans-acting factor to the chromatin segment. In certain embodiments, the step of unwinding the chromatin segment does not comprise forming a single or double-stranded break in the nucleic acid within the chromatin segment.

[0257] In certain embodiments of the approaches and methods described above, the alteration of DNA helical structure is achieved through the action of an “RNA-guided helicase,” which term is generally used to refer to a molecule, typically a peptide, that (a) interacts (e.g., complexes) with a gRNA, and (b) together with the gRNA, associates with and unwinds a target site. RNA-guided helicases may, in certain embodiments, comprise RNA-guided nucleases configured to lack nuclease activity. However, the inventors have observed that even a cleavage-competent RNA-guided nuclease may be adapted for use as an RNA-guided helicase by complexing it to a dead gRNA having a truncated targeting domain of 15 or fewer nucleotides in length. Complexes of wild-type RNA-guided nucleases with dead gRNAs exhibit reduced or eliminated RNA-cleavage activity, but appear to retain helicase activity. RNA-guided helicases and dead gRNAs are described in greater detail below.

[0258] Regarding RNA-guided helicases, according to the present disclosure an RNA-guided helicase may comprise any of the RNA-guided nucleases disclosed herein and infra under the heading entitled “RNA-guided nucleases,” including, without limitation, a Cas9 or Cpf1 RNA-guided nuclease. The helicase activity of these RNA-guided nucleases allow for unwinding of DNA, providing increased access of genome editing system components (e.g., without limitation, catalytically active RNA-guided nuclease and gRNAs) to the desired target region to be edited (e.g., the CCAAT box target region, 13 nt target region, proximal HBG1/2 promoter target sequence, and/or the GATA1 binding motif in BCL11Ae). In certain embodiments, the RNA-guided nuclease may be a catalytically active RNA-guided nuclease with nuclease activity. In certain embodiments, the RNA-guided helicase may be configured to lack nuclease activity. For example, in certain embodiments, the RNA-guided helicase may be a catalytically inactive RNA-guided nuclease that lacks nuclease activity, such as a catalytically dead Cas9 molecule, which still provides helicase activity. In certain embodiments, an RNA-guided helicase may form a complex with a dead gRNA, forming a dead RNP that cannot cleave nucleic acid. In other embodiments, the RNA-guided helicase may be a catalytically active RNA-guided nuclease complexed to a dead gRNA, forming a dead RNP that cannot cleave nucleic acid. In certain embodiments, the RNA-guided nuclease is not configured to recruit an exogenous trans-acting factor to the desired target region to be edited (e.g., the CCAAT box target region, 13 nt target region, proximal HBG1/2 promoter target sequence, and/or the GATA1 binding motif in BCL11Ae).

[0259] Turning to dead gRNAs, these include any of the dead gRNAs discussed herein and infra under the heading entitled “Dead gRNA molecules.” Dead gRNAs (also referred to herein as “dgRNAs”) may be generated by truncating the 5′ end of a gRNA targeting domain sequence, resulting in a targeting domain sequence of 15 nucleotides or fewer in length. In certain embodiments, a dgRNA may be generated by truncating the 5′ end of any one of a gRNA targeting domain sequence disclosed herein in Table 2 or Table 10. Dead guide RNA molecules according to the present disclosure include dead guide RNA molecules that have reduced, low, or undetectable cleavage activity. The targeting domain sequences of dead guide RNAs may be shorter in length by 1, 2, 3, 4, 5, 6, 7, 8, 9, or 10 nucleotides compared to the targeting domain sequence of active guide RNAs. Dead gRNA molecules may comprise targeting domains complementary to regions proximal to or within a target region (e.g., the CCAAT box target region, 13 nt target region, proximal HBG1/2 promoter target sequence, and/or the GATA1 binding motif in BCL11Ae) in a target nucleic acid. In certain embodiments, “proximal to” may denote the region within 10, 25, 50, 100, or 200 nucleotides of a target region (e.g., the CCAAT box target region, 13 nt target region, proximal HBG1/2 promoter target sequence, and/or the GATA1 binding motif in BCL11Ae). In certain embodiments, dead gRNAs comprise targeting domains complementary to the transcription strand or non-transcription strand of DNA. In certain embodiments, the dead guide RNA is not configured to recruit an exogenous trans-acting factor to a target region (e.g., the CCAAT box target region, 13 nt target region, proximal HBG1/2 promoter target sequence, and/or the GATA1 binding motif in BCL11Ae).

[0260] Also provided herein are methods of increasing a rate of indel formation in a target nucleic acid by unwinding DNA within or proximal to the target region (e.g., the CCAAT box target region, 13 nt target region, proximal HBG1/2 promoter target sequence, and/or the GATA1 binding motif in BCL11Ae) using an RNA-guided helicase, generating a DSB within the target region, and forming an indel in the target region through repair of the DSB. The step of unwinding the DNA using an RNA-guided helicase provides for increased indel formation compared to a method of forming indels that does not use a helicase.

[0261] This disclosure further encompasses methods of deleting a segment of a target nucleic acid in a cell, comprising contacting the cell with an RNA-guided helicase and generating a double strand break (DSB) within the target region (e.g., the CCAAT box target region, 13 nt target region, proximal HBG1/2 promoter target sequence, and/or the GATA1 binding motif in BCL11Ae). In certain embodiments, the RNA-guided helicase is configured to associate within or proximal to a target region of the target nucleic acid and unwind double stranded DNA (dsDNA) within or proximal to the target region. In certain embodiments, the target nucleic acid is a promoter region of a gene, a coding region of a gene, a non-coding region of a gene, an intron of a gene, or an exon of a gene. In certain embodiments, the segment of the target nucleic acid to be deleted may is at least about 15, 20, 25, 30, 35, 40, 45, 50, 55, 60, 65, 70, 75, or 100 base pairs in length. In certain embodiments, the DSB is repaired in a manner that deletes the segment of the target nucleic acid.

[0262] Genome editing systems configured to introduce alterations of helical structure may be implemented in a variety of ways, as is discussed below in detail. As an example, a genome editing system of this disclosure can be implemented as a ribonucleoprotein complex or a plurality of complexes in which multiple gRNAs are used. In certain embodiments, a ribonucleoprotein complex of the genome editing system may be an RNA-guided helicase complexed to a dead guide RNA. Ribonucleoprotein complexes can be introduced into a target cell using art-known methods, including electroporation, as described in Gori. Genome editing systems incorporating RNA-guided helicases may also be modified in any suitable manner, including without limitation by the inclusion of one or more of a DNA donor template that encodes a specific mutation (such as a deletion or insertion) in or near the target region, and/or an agent that enhances the efficiency with which such mutations are generated including, without limitation, a random oligonucleotide, a small molecule agonist or antagonist of a gene product involved in DNA repair or a DNA damage response, or a peptide agent. These modifications are described in greater detail below, under the heading “Genome Editing Strategies.” For clarity, this disclosure includes compositions comprising one or more gRNAs, dead gRNAs, RNA-guided helicases, RNA-guided nucleases, or a combination thereof.

[0263] While several of the exemplary embodiments above have focused on DNA unwinding, it should be noted that other helical alterations are within the scope of the present disclosure. These include, without limitation, overwinding, underwinding, increase or decrease of torsional strain on DNA strands within or proximate to a target region (e.g., through topoisomerase activity), denaturation or strand separation, and/or other suitable alterations resulting in modifications of chromatin structure. Each of these alterations may be catalyzed by an RNA-guided activity, or by the recruitment of an endogenous factor to a target region.

[0264] Also provided herein are genome editing systems and methods of altering one or more indels (e.g., indel signature) generated by an active guide. As the inventors have discovered herein, pairing of a dead RNP (dRNP) (i.e., a dead guide RNA complexed with an RNA-guided nuclease) and an active RNP (i.e., an active guide RNA complexed with an RNA-guided nuclease) can result in a change of the directionality of the indels (e.g., indel signature) generated by the active RNP alone (without a dRNP). As shown in the examples below, the use of the dead guide RNA may result in an increased frequency of larger deletions extending from the active guide RNA cut site toward the dead guide RNA binding site. Thus, the dead guide RNA may be used to effectively “orient” deletion editing toward a desired target site. In certain embodiments, the use of the dead guide RNA with an active guide RNA may increase the frequency of deletions that are not associated with micro-homologies.

[0265] Although the examples disclosed in the Examples section below are directed to alterations of the CCAAT box target region, skilled artisans would contemplate that the genome editing systems, methods, cells and compositions described herein may be used to alter any other target region, for example, without limitation, to increase the frequency of deletions at the target region, increase the frequency of deletions at the target region that are not associated with micro-homologies (e.g., not repaired via MMEJ).

[0266] This overview has focused on a handful of exemplary embodiments that illustrate the principles of genome editing systems and CRISPR-mediated methods of altering cells. For clarity, however, this disclosure encompasses modifications and variations that have not been expressly addressed above, but will be evident to those of skill in the art. With that in mind, the following disclosure is intended to illustrate the operating principles of genome editing systems more generally. What follows should not be understood as limiting, but rather illustrative of certain principles of genome editing systems and CRISPR-mediated methods utilizing these systems, which, in combination with the instant disclosure, will inform those of skill in the art about additional implementations and modifications that are within its scope.

### Genome Editing Systems

[0267] The term “genome editing system” refers to any system having RNA-guided DNA editing activity. Genome editing systems of the present disclosure include at least two components adapted from naturally occurring CRISPR systems: a guide RNA (gRNA) and an RNA-guided nuclease. These two components form a complex that is capable of associating with a specific nucleic acid sequence and editing the DNA in or around that nucleic acid sequence, for instance by making one or more of a single-strand break (an SSB or nick), a double-strand break (a DSB) and/or a point mutation.

[0268] In certain embodiments, the genome editing systems in this disclosure may include a helicase for unwinding DNA. In certain embodiments, the helicase may be an RNA-guided helicase. In certain embodiments, the RNA-guided helicase may be an RNA-guided nuclease as described herein, such as a Cas9 or Cpf1 molecule. In certain embodiments, the RNA-guided nuclease is not configured to recruit an exogenous trans-acting factor to a target region. In certain embodiments, the RNA-guided nuclease may be configured to lack nuclease activity. In certain embodiments, the RNA-guided helicase may be complexed with a dead guide RNA as disclosed herein. For example, the dead guide RNA (dgRNA) may comprise a targeting domain sequence less than 15 nucleotides in length. In certain embodiments, the dead guide RNA is not configured to recruit an exogenous trans-acting factor to a target region.

[0269] Naturally occurring CRISPR systems are organized evolutionarily into two classes and five types (Makarova 2011, incorporated by reference herein), and while genome editing systems of the present disclosure may adapt components of any type or class of naturally occurring CRISPR system, the embodiments presented herein are generally adapted from Class 2, and type II or V CRISPR systems. Class 2 systems, which encompass types II and V, are characterized by relatively large, multidomain RNA-guided nuclease proteins (e.g., Cas9 or Cpf1) and one or more guide RNAs (e.g., a crRNA and, optionally, a tracrRNA) that form ribonucleoprotein (RNP) complexes that associate with (i.e. target) and cleave specific loci complementary to a targeting (or spacer) sequence of the crRNA. Genome editing systems according to the present disclosure similarly target and edit cellular DNA sequences, but differ significantly from CRISPR systems occurring in nature. For example, the unimolecular guide RNAs described herein do not occur in nature, and both guide RNAs and RNA-guided nucleases according to this disclosure may incorporate any number of non-naturally occurring modifications.

[0270] Genome editing systems can be implemented (e.g. administered or delivered to a cell or a subject) in a variety of ways, and different implementations may be suitable for distinct applications. For instance, a genome editing system is implemented, in certain embodiments, as a protein/RNA complex (a ribonucleoprotein, or RNP), which can be included in a pharmaceutical composition that optionally includes a pharmaceutically acceptable carrier and/or an encapsulating agent, such as, without limitation, a lipid or polymer micro- or nano-particle, micelle, or liposome. In certain embodiments, a genome editing system is implemented as one or more nucleic acids encoding the RNA-guided nuclease and guide RNA components described above (optionally with one or more additional components); in certain embodiments, the genome editing system is implemented as one or more vectors comprising such nucleic acids, for instance a viral vector such as an adeno-associated virus (see section below under the heading “Implementation of genome editing systems: delivery, formulations, and routes of administration”); and in certain embodiments, the genome editing system is implemented as a combination of any of the foregoing. Additional or modified implementations that operate according to the principles set forth herein will be apparent to the skilled artisan and are within the scope of this disclosure.

[0271] It should be noted that the genome editing systems of the present disclosure can be targeted to a single specific nucleotide sequence, or may be targeted to—and capable of editing in parallel—two or more specific nucleotide sequences through the use of two or more guide RNAs. The use of multiple gRNAs is referred to as “multiplexing” throughout this disclosure, and can be employed to target multiple, unrelated target sequences of interest, or to form multiple SSBs or DSBs within a single target domain and, in some cases, to generate specific edits within such target domain. For example, International Patent Publication No. WO 2015/138510 by Maeder et al. (“Maeder”), which is incorporated by reference herein, describes a genome editing system for correcting a point mutation (C.2991+1655A to G) in the human CEP290 gene that results in the creation of a cryptic splice site, which in turn reduces or eliminates the function of the gene. The genome editing system of Maeder utilizes two guide RNAs targeted to sequences on either side of (i.e. flanking) the point mutation, and forms DSBs that flank the mutation. This, in turn, promotes deletion of the intervening sequence, including the mutation, thereby eliminating the cryptic splice site and restoring normal gene function.

[0272] As another example, WO 2016/073990 by Cotta-Ramusino et al. (“Cotta-Ramusino”), which is incorporated by reference herein, describes a genome editing system that utilizes two gRNAs in combination with a Cas9 nickase (a Cas9 that makes a single strand nick such as S. pyogenes D10A), an arrangement termed a “dual-nickase system.” The dual-nickase system of Cotta-Ramusino is configured to make two nicks on opposite strands of a sequence of interest that are offset by one or more nucleotides, which nicks combine to create a double strand break having an overhang (5′ in the case of Cotta-Ramusino, though 3′ overhangs are also possible). The overhang, in turn, can facilitate homology directed repair events in some circumstances. And, as another example, WO 2015/070083 by Palestrant et al. (incorporated by reference herein) describes a gRNA targeted to a nucleotide sequence encoding Cas9 (referred to as a “governing RNA”), which can be included in a genome editing system comprising one or more additional gRNAs to permit transient expression of a Cas9 that might otherwise be constitutively expressed, for example in some virally transduced cells. These multiplexing applications are intended to be exemplary, rather than limiting, and the skilled artisan will appreciate that other applications of multiplexing are generally compatible with the genome editing systems described here.

[0273] As disclosed herein, in certain embodiments, genome editing systems may comprise multiple gRNAs that may be used to introduce mutations into the GATA1 binding motif in BCL11Ae or the 13 nt target region of HBG1 and/or HBG2. In certain embodiments, genome editing systems disclosed herein may comprise multiple gRNAs used to introduce mutations into the GATA1 binding motif in BCL11Ae and the 13 nt target region of HBG1 and/or HBG2.

[0274] Genome editing systems can, in some instances, form double strand breaks that are repaired by cellular DNA double-strand break mechanisms such as NHEJ or HDR. These mechanisms are described throughout the literature (see, e.g., Davis & Maizels 2014 (describing Alt-HDR); Frit 2014 (describing Alt-NHEJ); Iyama & Wilson 2013 (describing canonical HDR and NHEJ pathways generally)).

[0275] Where genome editing systems operate by forming DSBs, such systems optionally include one or more components that promote or facilitate a particular mode of double-strand break repair or a particular repair outcome. For instance, Cotta-Ramusino also describes genome editing systems in which a single stranded oligonucleotide “donor template” is added; the donor template is incorporated into a target region of cellular DNA that is cleaved by the genome editing system, and can result in a change in the target sequence.

[0276] In certain embodiments, genome editing systems modify a target sequence, or modify expression of a gene in or near the target sequence, without causing single- or double-strand breaks. For example, a genome editing system may include an RNA-guided nuclease fused to a functional domain that acts on DNA, thereby modifying the target sequence or its expression. As one example, an RNA-guided nuclease can be connected to (e.g. fused to) a cytidine deaminase functional domain, and may operate by generating targeted C-to-A substitutions. Exemplary nuclease/deaminase fusions are described in Komor 2016, which is incorporated by reference herein. Alternatively, a genome editing system may utilize a cleavage-inactivated (i.e. a “dead”) nuclease, such as a dead Cas9 (dCas9), and may operate by forming stable complexes on one or more targeted regions of cellular DNA, thereby interfering with functions involving the targeted region(s) including, without limitation, mRNA transcription, chromatin remodeling, etc. In certain embodiments, a genome editing system may include an RNA-guided helicase that unwinds DNA within or proximal to the target sequence, without causing single- or double-stranded breaks. For example a genome editing system may include an RNA-guided helicase configured to associate within or near the target sequence to unwind DNA and induce accessibility to the target sequence. In certain embodiments, the RNA-guided helicase may be complexed to a dead guide RNA that is configured to lack cleavage activity allowing for unwinding of the DNA without causing breaks in the DNA.

Guide RNA (gRNA) Molecules

[0277] The terms “guide RNA” and “gRNA” refer to any nucleic acid that promotes the specific association (or “targeting”) of an RNA-guided nuclease such as a Cas9 or a Cpf1 to a target sequence such as a genomic or episomal sequence in a cell. gRNAs can be unimolecular (comprising a single RNA molecule, and referred to alternatively as chimeric), or modular (comprising more than one, and typically two, separate RNA molecules, such as a crRNA and a tracrRNA, which are usually associated with one another, for instance by duplexing). gRNAs and their component parts are described throughout the literature (see, e.g., Briner 2014, which is incorporated by reference; Cotta-Ramusino). Examples of modular and unimolecular gRNAs that may be used according to the embodiments herein include, without limitation, the sequences set forth in SEQ ID NOs:29-31 and 38-51. Examples of gRNA proximal and tail domains that may be used according to the embodiments herein include, without limitation, the sequences set forth in SEQ ID NOs:32-37.

[0278] In bacteria and archea, type II CRISPR systems generally comprise an RNA-guided nuclease protein such as Cas9, a CRISPR RNA (crRNA) that includes a 5′ region that is complementary to a foreign sequence, and a trans-activating crRNA (tracrRNA) that includes a 5′ region that is complementary to, and forms a duplex with, a 3′ region of the crRNA. While not intending to be bound by any theory, it is thought that this duplex facilitates the formation of—and is necessary for the activity of—the Cas9/gRNA complex. As type II CRISPR systems were adapted for use in gene editing, it was discovered that the crRNA and tracrRNA could be joined into a single unimolecular or chimeric guide RNA, in one non-limiting example, by means of a four nucleotide (e.g. GAAA) “tetraloop” or “linker” sequence bridging complementary regions of the crRNA (at its 3′ end) and the tracrRNA (at its 5′ end). (Mali 2013; Jiang 2013; Jinek 2012; all incorporated by reference herein).

[0279] Guide RNAs, whether unimolecular or modular, include a “targeting domain” that is fully or partially complementary to a target domain within a target sequence, such as a DNA sequence in the genome of a cell where editing is desired. Targeting domains are referred to by various names in the literature, including without limitation “guide sequences” (Hsu 2013, incorporated by reference herein), “complementarity regions” (Cotta-Ramusino), “spacers” (Briner 2014) and generically as “crRNAs” (Jiang). Irrespective of the names they are given, targeting domains are typically 10-30 nucleotides in length, and in certain embodiments are 16-24 nucleotides in length (for instance, 16, 17, 18, 19, 20, 21, 22, 23 or 24 nucleotides in length), and are at or near the 5′ terminus of in the case of a Cas9 gRNA, and at or near the 3′ terminus in the case of a Cpf1 gRNA.

[0280] In addition to the targeting domains, gRNAs typically (but not necessarily, as discussed below) include a plurality of domains that may influence the formation or activity of gRNA/Cas9 complexes. For instance, as mentioned above, the duplexed structure formed by first and secondary complementarity domains of a gRNA (also referred to as a repeat:anti-repeat duplex) interacts with the recognition (REC) lobe of Cas9 and can mediate the formation of Cas9/gRNA complexes (Nishimasu 2014; Nishimasu 2015; both incorporated by reference herein). It should be noted that the first and/or second complementarity domains may contain one or more poly-A tracts, which can be recognized by RNA polymerases as a termination signal. The sequence of the first and second complementarity domains are, therefore, optionally modified to eliminate these tracts and promote the complete in vitro transcription of gRNAs, for instance through the use of A-G swaps as described in Briner 2014, or A-U swaps. These and other similar modifications to the first and second complementarity domains are within the scope of the present disclosure.

[0281] Along with the first and second complementarity domains, Cas9 gRNAs typically include two or more additional duplexed regions that are involved in nuclease activity in vivo but not necessarily in vitro. (Nishimasu 2015). A first stem-loop one near the 3′ portion of the second complementarity domain is referred to variously as the “proximal domain,” (Cotta-Ramusino) “stem loop 1” (Nishimasu 2014 and 2015) and the “nexus” (Briner 2014). One or more additional stem loop structures are generally present near the 3′ end of the gRNA, with the number varying by species: S. pyogenes gRNAs typically include two 3′ stem loops (for a total of four stem loop structures including the repeat:anti-repeat duplex), while S. aureus and other species have only one (for a total of three stem loop structures). A description of conserved stem loop structures (and gRNA structures more generally) organized by species is provided in Briner 2014.

[0282] While the foregoing description has focused on gRNAs for use with Cas9, it should be appreciated that other RNA-guided nucleases exist which utilize gRNAs that differ in some ways from those described to this point. For instance, Cpf1 (“CRISPR from Prevotella and Franciscella 1”) is a recently discovered RNA-guided nuclease that does not require a tracrRNA to function. (Zetsche 2015, incorporated by reference herein). A gRNA for use in a Cpf1 genome editing system generally includes a targeting domain and a complementarity domain (alternately referred to as a “handle”). It should also be noted that, in gRNAs for use with Cpf1, the targeting domain is usually present at or near the 3′ end, rather than the 5′ end as described above in connection with Cas9 gRNAs (the handle is at or near the 5′ end of a Cpf1 gRNA). Exemplary targeting domains of Cpf1 gRNAs are set forth in Table 13 and Table 18.

[0283] Those of skill in the art will appreciate, however, that although structural differences may exist between gRNAs from different prokaryotic species, or between Cpf1 and Cas9 gRNAs, the principles by which gRNAs operate are generally consistent. Because of this consistency of operation, gRNAs can be defined, in broad terms, by their targeting domain sequences, and skilled artisans will appreciate that a given targeting domain sequence can be incorporated in any suitable gRNA, including a unimolecular or chimeric gRNA, or a gRNA that includes one or more chemical modifications and/or sequential modifications (substitutions, additional nucleotides, truncations, etc.). Thus, for economy of presentation in this disclosure, gRNAs may be described solely in terms of their targeting domain sequences.

[0284] More generally, skilled artisans will appreciate that some aspects of the present disclosure relate to systems, methods and compositions that can be implemented using multiple RNA-guided nucleases. For this reason, unless otherwise specified, the term gRNA should be understood to encompass any suitable gRNA that can be used with any RNA-guided nuclease, and not only those gRNAs that are compatible with a particular species of Cas9 or Cpf1. By way of illustration, the term gRNA can, in certain embodiments, include a gRNA for use with any RNA-guided nuclease occurring in a Class 2 CRISPR system, such as a type II or type V or CRISPR system, or an RNA-guided nuclease derived or adapted therefrom.

gRNA Design

[0285] Methods for selection and validation of target sequences as well as off-target analyses have been described previously (see, e.g., Mali 2013; Hsu 2013; Fu 2014; Heigwer 2014; Bae 2014; Xiao 2014). Each of these references is incorporated by reference herein. As a non-limiting example, gRNA design may involve the use of a software tool to optimize the choice of potential target sequences corresponding to a user's target sequence, e.g., to minimize total off-target activity across the genome. While off-target activity is not limited to cleavage, the cleavage efficiency at each off-target sequence can be predicted, e.g., using an experimentally-derived weighting scheme. These and other guide selection methods are described in detail in Maeder and Cotta-Ramusino.

[0286] With respect to selection of gRNA targeting domain sequences directed to HBG1/2 target sites (e.g. the 13 nt target region), an in-silico gRNA target domain identification tool was utilized, and the hits were stratified into four tiers. For S. pyogenes, tier 1 targeting domains were selected based on (1) distance upstream or downstream from either end of the target site (i.e., HBG1/2 13 nt target region), specifically within 400 bp of either end of the target site, (2) a high level of orthogonality, and (3) the presence of 5′ G. Tier 2 targeting domains were selected based on (1) distance upstream or downstream from either end of the target site (i.e., HBG1/2 13 nt target region), specifically within 400 bp of either end of the target site, and (2) a high level of orthogonality. Tier 3 targeting domains were selected based on (1) distance upstream or downstream from either end of the target site (i.e., HBG1/2 13 nt target region), specifically within 400 bp of either end of the target site and (2) the presence of 5′ G. Tier 4 targeting domains were selected based on distance upstream or downstream from either end of the target site (i.e., HBG1/2 13 nt target region), specifically within 400 bp of either end of the target site.

[0287] For S. aureus, tier 1 targeting domains were selected based on (1) distance upstream or downstream from either end of the target site (i.e., HBG1/2 13 nt target region), specifically within 400 bp of either end of the target site, (2) a high level of orthogonality, (3) the presence of 5′ G, and (4) PAM having the sequence NNGRRT (SEQ ID NO:204). Tier 2 targeting domains were selected based on (1) distance upstream or downstream from either end of the target site (i.e., HBG1/2 13 nt target), specifically within 400 bp of either end of the target site, (2) a high level of orthogonality, and (3) PAM having the sequence NNGRRT (SEQ ID NO:204). Tier 3 targeting domains were selected based on (1) distance upstream or downstream from either end of the target site (i.e., HBG1/2 13 nt target region), specifically within 400 bp of either end of the target site, and (2) PAM having the sequence NNGRRT (SEQ ID NO:204). Tier 4 targeting domains were selected based on (1) distance upstream or downstream from either end of the target site (i.e., HBG1/2 13 nt target), specifically within 400 bp of either end of the target site, and (2) PAM having the sequence NNGRRV (SEQ ID NO:205).

[0288] Table 2, below, presents targeting domains for S. pyogenes and S. aureus gRNAs, broken out by (a) tier (1, 2, 3 or 4) and (b) HBG1 or HBG2.

TABLE 2
gRNA targeting domain sequences for HBG1/2 target sites

| | |
|---|---|
| HBG1 | HBG2 |

S. pyogenes

| | | |
|---|---|---|
| Tier 1 | 251-256 | 760-764 |
| Tier 2 | 257-274 | 765-781 |
| Tier 3 | 275-300 | 275-281, 283-300 |
| Tier 4 | 301-366 | 301-311, 313-342, 344-348, |
| | | 350-366, 782, 783 |

S. aureus

| | | |
|---|---|---|
| Tier 1 | 367-376 | 784-791 |
| Tier 2 | 343, 377-393 | 778, 792-803 |
| Tier 3 | 357, 365, 394-461 | 357, 365, 394-461 |
| Tier 4 | 252-254, 256, 268, 272-274, | 292, 295, 347, 348, 353, |
| | 292, 295, 347, 348, 353, | 360-362, 366, 462-468 476-481, |
| | 360-362, 366, 598-759 | 489-587, 601-607, 614-620, |
| | | 640-666, 674-679, 687-693, |
| | | 708-714, 733-753, 762-764, |
| | | 775, 779-781, 804-901 |

[0289] Additional gRNA sequences that were designed to target alteration of the CCAAT box target region include, but are not limited to, the sequences set forth in SEQ ID NOs:970 and 971. Targeting domain sequences of gRNAs that were designed to target disruption of the CCAAT box target region include, but are not limited to, SEQ ID NO:1002. Targeting domain sequences plus PAM (UUUG) of gRNAs that were designed to target disruption of the CCAAT box target region include, but are not limited to, SEQ ID NO:1004. In certain embodiments, gRNAs comprising the sequence set forth in SEQ ID NOs:1002 and/or 1004 may be complexed with a Cpf1 protein or modified Cpf1 protein to generate alterations at the CCAAT box target region. In certain embodiments, gRNAs comprising any of the Cpf1 gRNAs set forth in Table 15, Table 18, or Table 19 may be complexed with a Cpf1 protein or modified Cpf1 protein forming an RNP (“gRNA-Cpf1-RNP”) to generate alterations at the CCAAT box target region. In certain embodiments, the modified Cpf1 protein may be His-AsCpf1-nNLS (SEQ ID NO: 1000) or His-AsCpf1-sNLS-sNLS (SEQ ID NO:1001). In certain embodiments, the Cpf1 molecule of the gRNA-Cpf1-RNP may be encoded by a sequence set forth in SEQ ID NOs:1000, 1001, 1008-1018, 1032, 1035-39 (Cpf1 polypeptide sequences) or SEQ ID NOs:1019-1021 (Cpf1 polynucleotide sequences).

[0290] gRNAs may be designed to target the erythroid specific enhancer of BCL11A (BCL11Ae) to disrupt expression of a transcriptional repressor, BCL11A (described in Friedland, which is incorporated by reference herein). gRNAs were designed to target the GATA1 binding motif that is in the erythroid specific enhancer of BCL11A that is in the +58 DHS region of intron 2 (i.e., the GATA1 binding motif in BCL11Ae), where the +58 DHS enhancer region comprises the sequence set forth in SEQ ID NO:968. Targeting domain sequences of gRNAs that were designed to target disruption of the GATA1 binding motif in BCL11Ae, include, but are not limited to, the sequences set forth in SEQ ID NOs:952-955. Targeting domain sequences plus PAM (NGG) of gRNAs that were designed to target disruption of the GATA1 binding motif in BCL11Ae, include, but are not limited to, the sequences set forth in SEQ ID NOs:960-963.

gRNA Modifications

[0291] The activity, stability, or other characteristics of gRNAs can be altered through the incorporation of certain modifications. As one example, transiently expressed or delivered nucleic acids can be prone to degradation by, e.g., cellular nucleases. Accordingly, the gRNAs described herein can contain one or more modified nucleosides or nucleotides which introduce stability toward nucleases. While not wishing to be bound by theory it is also believed that certain modified gRNAs described herein can exhibit a reduced innate immune response when introduced into cells. Those of skill in the art will be aware of certain cellular responses commonly observed in cells, e.g., mammalian cells, in response to exogenous nucleic acids, particularly those of viral or bacterial origin. Such responses, which can include induction of cytokine expression and release and cell death, may be reduced or eliminated altogether by the modifications presented herein.

[0292] Certain exemplary modifications discussed in this section can be included at any position within a gRNA sequence including, without limitation at or near the 5′ end (e.g., within 1-10, 1-5, or 1-2 nucleotides of the 5′ end) and/or at or near the 3′ end (e.g., within 1-10, 1-5, or 1-2 nucleotides of the 3′ end). In some cases, modifications are positioned within functional motifs, such as the repeat-anti-repeat duplex of a Cas9 gRNA, a stem loop structure of a Cas9 or Cpf1 gRNA, and/or a targeting domain of a gRNA.

[0293] As one example, the 5′ end of a gRNA can include a eukaryotic mRNA cap structure or cap analog (e.g., a G(5′)ppp(5′)G cap analog, a m7G(5′)ppp(5′)G cap analog, or a 3′-O-Me-m7G(5′)ppp(5′)G anti reverse cap analog (ARCA)), as shown below:

[chemical structure]

The cap or cap analog can be included during either chemical synthesis or in vitro transcription of the gRNA.

[0294] Along similar lines, the 5′ end of the gRNA can lack a 5′ triphosphate group. For instance, in vitro transcribed gRNAs can be phosphatase-treated (e.g., using calf intestinal alkaline phosphatase) to remove a 5′ triphosphate group.

[0295] Another common modification involves the addition, at the 3′ end of a gRNA, of a plurality (e.g., 1-10, 10-20, or 25-200) of adenine (A) residues referred to as a polyA tract. The polyA tract can be added to a gRNA during chemical synthesis, following in vitro transcription using a polyadenosine polymerase (e.g., E. coli Poly(A)Polymerase), or in vivo by means of a polyadenylation sequence, as described in Maeder.

[0296] It should be noted that the modifications described herein can be combined in any suitable manner, e.g. a gRNA, whether transcribed in vivo from a DNA vector, or in vitro transcribed gRNA, can include either or both of a 5′ cap structure or cap analog and a 3′ polyA tract.

[0297] Guide RNAs can be modified at a 3′ terminal U ribose. For example, the two terminal hydroxyl groups of the U ribose can be oxidized to aldehyde groups and a concomitant opening of the ribose ring to afford a modified nucleoside as shown below:

[chemical structure]

wherein “U” can be an unmodified or modified uridine.

[0298] The 3′ terminal U ribose can be modified with a 2′3′ cyclic phosphate as shown below:

[chemical structure]

wherein “U” can be an unmodified or modified uridine.

[0299] Guide RNAs can contain 3′ nucleotides which can be stabilized against degradation, e.g., by incorporating one or more of the modified nucleotides described herein. In certain embodiments, uridines can be replaced with modified uridines, e.g., 5-(2-amino)propyl uridine, and 5-bromo uridine, or with any of the modified uridines described herein; adenosines and guanosines can be replaced with modified adenosines and guanosines, e.g., with modifications at the 8-position, e.g., 8-bromo guanosine, or with any of the modified adenosines or guanosines described herein.

[0300] In certain embodiments, sugar-modified ribonucleotides can be incorporated into the gRNA, e.g., wherein the 2′ OH-group is replaced by a group selected from H, —OR, —R (wherein R can be, e.g., alkyl, cycloalkyl, aryl, aralkyl, heteroaryl or sugar), halo, —SH, —SR (wherein R can be, e.g., alkyl, cycloalkyl, aryl, aralkyl, heteroaryl or sugar), amino (wherein amino can be, e.g., NH₂; alkylamino, dialkylamino, heterocyclyl, arylamino, diarylamino, heteroarylamino, diheteroarylamino, or amino acid); or cyano (—CN). In certain embodiments, the phosphate backbone can be modified as described herein, e.g., with a phosphorothioate (PhTx) group. In certain embodiments, one or more of the nucleotides of the gRNA can each independently be a modified or unmodified nucleotide including, but not limited to 2′-sugar modified, such as, 2′-O-methyl, 2′-O-methoxyethyl, or 2′-Fluoro modified including, e.g., 2′-F or 2′-O-methyl, adenosine (A), 2′-F or 2′-O-methyl, cytidine (C), 2′-F or 2′-O-methyl, uridine (U), 2′-F or 2′-O-methyl, thymidine (T), 2′-F or 2′-O-methyl, guanosine (G), 2′-O-methoxyethyl-5-methyluridine (Teo), 2′-O-methoxyethyladenosine (Aeo), 2′-O-methoxyethyl-5-methylcytidine (m5Ceo), and any combinations thereof.

[0301] Guide RNAs can also include “locked” nucleic acids (LNA) in which the 2′ OH-group can be connected, e.g., by a C1-6 alkylene or C1-6 heteroalkylene bridge, to the 4′ carbon of the same ribose sugar. Any suitable moiety can be used to provide such bridges, include without limitation methylene, propylene, ether, or amino bridges; O-amino (wherein amino can be, e.g., NH₂; alkylamino, dialkylamino, heterocyclyl, arylamino, diarylamino, heteroarylamino, or diheteroarylamino, ethylenediamine, or polyamino) and aminoalkoxy or O(CH₂)ₙ-amino (wherein amino can be, e.g., NH₂; alkylamino, dialkylamino, heterocyclyl, arylamino, diarylamino, heteroarylamino, or diheteroarylamino, ethylenediamine, or polyamino).

[0302] In certain embodiments, a gRNA can include a modified nucleotide which is multicyclic (e.g., tricyclo; and “unlocked” forms, such as glycol nucleic acid (GNA) (e.g., R-GNA or S-GNA, where ribose is replaced by glycol units attached to phosphodiester bonds), or threose nucleic acid (TNA, where ribose is replaced with α-L-threofuranosyl-(3′→2′)).

[0303] Generally, gRNAs include the sugar group ribose, which is a 5-membered ring having an oxygen. Exemplary modified gRNAs can include, without limitation, replacement of the oxygen in ribose (e.g., with sulfur (S), selenium (Se), or alkylene, such as, e.g., methylene or ethylene); addition of a double bond (e.g., to replace ribose with cyclopentenyl or cyclohexenyl); ring contraction of ribose (e.g., to form a 4-membered ring of cyclobutane or oxetane); ring expansion of ribose (e.g., to form a 6- or 7-membered ring having an additional carbon or heteroatom, such as for example, anhydrohexitol, altritol, mannitol, cyclohexanyl, cyclohexenyl, and morpholino that also has a phosphoramidate backbone). Although the majority of sugar analog alterations are localized to the 2′ position, other sites are amenable to modification, including the 4′ position. In certain embodiments, a gRNA comprises a 4′-S, 4′-Se or a 4′-C-aminomethyl-2′-O-Me modification.

[0304] In certain embodiments, deaza nucleotides, e.g., 7-deaza-adenosine, can be incorporated into the gRNA. In certain embodiments, O- and N-alkylated nucleotides, e.g., N6-methyl adenosine, can be incorporated into the gRNA. In certain embodiments, one or more or all of the nucleotides in a gRNA are deoxynucleotides.

[0305] In certain embodiments, gRNAs as used herein may be modified or unmodified gRNAs. In certain embodiments, a gRNA may include one or more modifications. In certain embodiments, the one or more modifications may include a phosphorothioate linkage modification, a phosphorodithioate (PS2) linkage modification, a 2′-O-methyl modification, or combinations thereof. In certain embodiments, the one or more modifications may be at the 5′ end of the gRNA, at the 3′ end of the gRNA, or combinations thereof.

[0306] In certain embodiments, a gRNA modification may comprise one or more phosphorodithioate (PS2) linkage modifications.

[0307] In some embodiments, a gRNA used herein includes one or more or a stretch of deoxyribonucleic acid (DNA) bases, also referred to herein as a “DNA extension” In some embodiments, a gRNA used herein includes a DNA extension at the 5′ end of the gRNA, the 3′ end of the gRNA, or a combination thereof. In certain embodiments, the DNA extension may be 1, 2, 3, 4, 5, 6, 7, 8, 9, 10, 11, 12, 13, 14, 15, 16, 17, 18, 19, 20, 21, 22, 23, 24, 25, 26, 27, 28, 29, 30, 31, 32, 33, 34, 35, 36, 37, 38, 39, 40, 41, 42, 43, 44, 45, 46, 47, 48, 49, 50, 51, 52, 53, 54, 55, 56, 57, 58, 59, 60, 61, 62, 63, 64, 65, 66, 67, 68, 69, 70, 71, 72, 73, 74, 75, 76, 77, 78, 79, 80, 81, 82, 83, 84, 85, 86, 87, 88, 89, 90, 91, 92, 93, 94, 95, 96, 97, 98, 99, or 100 DNA bases long. For example, in certain embodiments, the DNA extension may be 1, 2, 3, 4, 5, 10, 15, 20, or 25 DNA bases long. In certain embodiments, the DNA extension may include one or more DNA bases selected from adenine (A), guanine (G), cytosine (C), or thymine (T). In certain embodiments, the DNA extension includes the same DNA bases. For example, the DNA extension may include a stretch of adenine (A) bases. In certain embodiments, the DNA extension may include a stretch of thymine (T) bases. In certain embodiments, the DNA extension includes a combination of different DNA bases. In certain embodiments, a DNA extension may comprise a sequence set forth in Table 24. For example, a DNA extension may comprise a sequence set forth in SEQ ID NOs:1235-1250. In certain embodiments, a gRNA used herein includes a DNA extension as well as one or more phosphorothioate linkage modifications, one or more phosphorodithioate (PS2) linkage modifications, one or more 2′-O-methyl modifications, or combinations thereof. In certain embodiments, the one or more modifications may be at the 5′ end of the gRNA, at the 3′ end of the gRNA, or combinations thereof. In certain embodiments, a gRNA including a DNA extension may comprise a sequence set forth in Table 19 that includes a DNA extension. In a particular embodiment, a gRNA including a DNA extension may comprise the sequence set forth in SEQ ID NO:1051. In certain embodiments, a gRNA including a DNA extension may comprise a sequence selected from the group consisting of SEQ ID NOs:1046-1060, 1067, 1068, 1074, 1075, 1078, 1081-1084, 1086-1087, 1089-1090, 1092-1093, 1098-1102, and 1106. Without wishing to be bound by theory, it is contemplated that any DNA extension may be used herein, so long as it does not hybridize to the target nucleic acid being targeted by the gRNA and it also exhibits an increase in editing at the target nucleic acid site relative to a gRNA which does not include such a DNA extension.

[0308] In some embodiments, a gRNA used herein includes one or more or a stretch of ribonucleic acid (RNA) bases, also referred to herein as an “RNA extension.” In some embodiments, a gRNA used herein includes an RNA extension at the 5′ end of the gRNA, the 3′ end of the gRNA, or a combination thereof. In certain embodiments, the RNA extension may be 1, 2, 3, 4, 5, 6, 7, 8, 9, 10, 11, 12, 13, 14, 15, 16, 17, 18, 19, 20, 21, 22, 23, 24, 25, 26, 27, 28, 29, 30, 31, 32, 33, 34, 35, 36, 37, 38, 39, 40, 41, 42, 43, 44,45, 46, 47, 48, 49, 50, 51, 52, 53, 54, 55, 56, 57, 58, 59, 60, 61, 62, 63, 64, 65, 66, 67, 68, 69, 70, 71, 72, 73, 74, 75, 76, 77, 78, 79, 80, 81, 82, 83, 84, 85, 86, 87, 88, 89, 90, 91, 92, 93, 94, 95, 96, 97, 98, 99, or 100 RNA bases long. For example, in certain embodiments, the RNA extension may be 1, 2, 3, 4, 5, 10, 15, 20, or 25 RNA bases long. In certain embodiments, the RNA extension may include one or more RNA bases selected from adenine (rA), guanine (rG), cytosine (rC), or uracil (rU), in which the “r” represents RNA, 2′-hydroxy. In certain embodiments, the RNA extension includes the same RNA bases. For example, the RNA extension may include a stretch of adenine (rA) bases. In certain embodiments, the RNA extension includes a combination of different RNA bases. In certain embodiments, an RNA extension may comprise a sequence set forth in Table 24. For example, an RNA extension may comprise a sequence set forth in 1231-1234, 1251-1253. In certain embodiments, a gRNA used herein includes an RNA extension as well as one or more phosphorothioate linkage modifications, one or more phosphorodithioate (PS2) linkage modifications, one or more 2′-O-methyl modifications, or combinations thereof. In certain embodiments, the one or more modifications may be at the 5′ end of the gRNA, at the 3′ end of the gRNA, or combinations thereof. In certain embodiments, a gRNA including a RNA extension may comprise a sequence set forth in Table 19 that includes an RNA extension. gRNAs including an RNA extension at the 5′ end of the gRNA may comprise a sequence selected from the group consisting of SEQ ID NOs:1042-1045, 1103-1105. gRNAs including an RNA extension at the 3′ end of the gRNA may comprise a sequence selected from the group consisting of SEQ ID NOs:1070-1075, 1079, 1081, 1098-1100.

[0309] It is contemplated that gRNAs used herein may also include an RNA extension and a DNA extension. In certain embodiments, the RNA extension and DNA extension may both be at the 5′ end of the gRNA, the 3′ end of the gRNA, or a combination thereof. In certain embodiments, the RNA extension is at the 5′ end of the gRNA and the DNA extension is at the 3′ end of the gRNA. In certain embodiments, the RNA extension is at the 3′ end of the gRNA and the DNA extension is at the 5′ end of the gRNA.

[0310] In some embodiments, a gRNA which includes both a phosphorothioate modification at the 3′ end as well as a DNA extension at the 5′ end is complexed with a RNA-guided nuclease, e.g., Cpf1, to form an RNP, which is then employed to edit a hematopoietic stem cell (HSC) or a CD34+ cell ex vivo (i.e., outside the body of a subject from whom such a cell is derived), at the HBG locus.

[0311] An example of a gRNA as used herein comprises the sequence set forth in SEQ ID NO:1051.

Dead gRNA Molecules

[0312] Dead guide RNA (dgRNA) molecules according to the present disclosure include dead guide RNA molecules that comprise reduced, low, or undetectable cleavage activity. The targeting domain sequences of dead guide RNAs are shorter in length by 1, 2, 3, 4, 5, 6, 7, 8, 9, or 10 nucleotides compared to the targeting domain sequence of active guide RNAs. In certain embodiments, dead guide RNA molecules may comprise a targeting domain comprising 15 nucleotides or fewer in length, 14 nucleotides or fewer in length, 13 nucleotides or fewer in length, 12 nucleotides or fewer in length, or 11 nucleotides or fewer in length. In some embodiments, dead guide RNAs are configured such that they do not provide an RNA guided-nuclease cleavage event. Dead guide RNAs may be generated by removing the 5′ end of a gRNA targeting domain sequence, which results in a truncated targeting domain sequence. For example, if a gRNA sequence, configured to provide a cleavage event (i.e., 17 nucleotides or more in length), has a targeting domain sequence that is 20 nucleotides in length, a dead guide RNA may be created by removing 5 nucleotides from the 5′ end of the gRNA sequence. For example, dgRNAs used herein may comprise a targeting domain set forth in Table 2 or Table 10 that has been truncated from the 5′ end of the gRNA sequence and comprises 15 nucleotides or fewer in length. In certain embodiments, the dgRNA may be configured to bind (or associate with) a nucleic acid sequence within or proximal to a target region (e.g., the CCAAT box target region, 13 nt target region, proximal HBG1/2 promoter target sequence, and/or the GATA1 binding motif in BCL11Ae) to be edited. For example, any of the dgRNAs set forth in Table 10 may be employed to bind a nucleic acid sequence proximal to the 13 nt target region or CCAAT box target region. In certain embodiments, proximal to may denote the region within 10, 25, 50, 100, or 200 nucleotides of a target region (e.g., the CCAAT box target region, 13 nt target region, proximal HBG1/2 promoter target sequence, and/or the GATA1 binding motif in BCL11Ae). In certain embodiments, the dead guide RNA is not configured to recruit an exogenous trans-acting factor to a target region. In certain embodiments, the dgRNA is configured such that it does not provide a DNA cleavage event when complexed with an RNA-guided nuclease. Skilled artisans will appreciate that dead guide RNA molecules may be designed to comprise targeting domains complementary to regions proximal to or within a target region in a target nucleic acid. In certain embodiments, dead guide RNAs comprise targeting domain sequences that are complementary to the transcription strand or non-transcription strand of double stranded DNA. The dgRNAs herein may include modifications at the 5′ and 3′ end of the dgRNA as described for guide RNAs in the section “gRNA modifications” herein. For example, in certain embodiments, dead guide RNAs may include an anti-reverse cap analog (ARCA) at the 5′ end of the RNA. In certain embodiments, dgRNAs may include a polyA tail at the 3′ end.

[0313] In certain embodiments, the use of a dead guide RNA with the genome editing systems and methods disclosed herein may increase the total editing level of an active guide RNA. In certain embodiments, the use of a dead guide RNA with the genome editing systems disclosed herein and methods thereof may increase the frequency of deletions. In certain embodiments, the deletions may extend from the cut site of the active guide RNA toward the dead guide RNA binding site. In this way the dead guide RNA can change the directionality of an active guide RNA and orient editing toward a desired target region.

[0314] As used herein, the terms “dead gRNA” and “truncated gRNA” are used interchangeably.

### RNA-Guided Nucleases

[0315] RNA-guided nucleases according to the present disclosure include, but are not limited to, naturally-occurring Class 2 CRISPR nucleases such as Cas9, and Cpf1, as well as other nucleases derived or obtained therefrom. It has also been shown that certain RNA-guided nucleases, such as Cas9, also have helicase activity that enables them to unwind nucleic acid. In certain embodiments, the RNA-guided helicases according to the present disclosure may be any of the RNA-nucleases described herein and supra in the section entitled “RNA-guided nucleases.” In certain embodiments, the RNA-guided nuclease is not configured to recruit an exogenous trans-acting factor to a target region. In certain embodiments, an RNA-guided helicase may be an RNA-guided nuclease configured to lack nuclease activity. For example, in certain embodiments, an RNA-guided helicase may be a catalytically inactive RNA-guided nuclease that lacks nuclease activity, but still retains its helicase activity. In certain embodiments, an RNA-guided nuclease may be mutated to abolish its nuclease activity (e.g., dead Cas9), creating a catalytically inactive RNA-guided nuclease that is unable to cleave nucleic acid, but which can still unwind DNA. In certain embodiments, an RNA-guided helicase may be complexed with any of the dead guide RNAs as described herein. For example, a catalytically active RNA-guided helicase (e.g., Cas9 or Cpf1) may form an RNP complex with a dead guide RNA, resulting in a catalytically inactive dead RNP (dRNP). In certain embodiments, a catalytically inactive RNA-guided helicase (e.g., dead Cas9) and a dead guide RNA may form a dRNP. These dRNPs, although incapable of providing a cleavage event, still retain their helicase activity that is important for unwinding nucleic acid.

[0316] In functional terms, RNA-guided nucleases are defined as those nucleases that: (α) interact with (e.g. complex with) a gRNA; and (b) together with the gRNA, associate with, and optionally cleave or modify, a target region of a DNA that includes (i) a sequence complementary to the targeting domain of the gRNA and, optionally, (ii) an additional sequence referred to as a “protospacer adjacent motif,” or “PAM,” which is described in greater detail below. As the following examples will illustrate, RNA-guided nucleases can be defined, in broad terms, by their PAM specificity and cleavage activity, even though variations may exist between individual RNA-guided nucleases that share the same PAM specificity or cleavage activity. Skilled artisans will appreciate that some aspects of the present disclosure relate to systems, methods and compositions that can be implemented using any suitable RNA-guided nuclease having a certain PAM specificity and/or cleavage activity. For this reason, unless otherwise specified, the term RNA-guided nuclease should be understood as a generic term, and not limited to any particular type (e.g. Cas9 vs. Cpf1), species (e.g. S. pyogenes vs. S. aureus) or variation (e.g. full-length vs. truncated or split; naturally-occurring PAM specificity vs. engineered PAM specificity, etc.) of RNA-guided nuclease.

[0317] Various RNA-guided nucleases may require different sequential relationships between PAMs and protospacers. In general, Cas9s recognize PAM sequences that are 3′ of the protospacer. Cpf1, on the other hand, generally recognizes PAM sequences that are 5′ of the protospacer.

[0318] In addition to recognizing specific sequential orientations of PAMs and protospacers, RNA-guided nucleases can also recognize specific PAM sequences. S. aureus Cas9, for instance, recognizes a PAM sequence of NNGRRT or NNGRRV, wherein the N residues are immediately 3′ of the region recognized by the gRNA targeting domain. S. pyogenes Cas9 recognizes NGG PAM sequences. And F. novicida Cpf1 recognizes a TTN PAM sequence. PAM sequences have been identified for a variety of RNA-guided nucleases, and a strategy for identifying novel PAM sequences has been described by Shmakov 2015. It should also be noted that engineered RNA-guided nucleases can have PAM specificities that differ from the PAM specificities of reference molecules (for instance, in the case of an engineered RNA-guided nuclease, the reference molecule may be the naturally occurring variant from which the RNA-guided nuclease is derived, or the naturally occurring variant having the greatest amino acid sequence homology to the engineered RNA-guided nuclease). Examples of PAMs that may be used according to the embodiments herein include, without limitation, the sequences set forth in SEQ ID NOs:199-205.

[0319] In addition to their PAM specificity, RNA-guided nucleases can be characterized by their DNA cleavage activity: naturally-occurring RNA-guided nucleases typically form DSBs in target nucleic acids, but engineered variants have been produced that generate only SSBs (discussed above and in Ran & Hsu 2013, incorporated by reference herein), or that do not cut at all.

### Cas9

[0320] Crystal structures have been determined for S. pyogenes Cas9 (Jinek 2014), and for S. aureus Cas9 in complex with a unimolecular guide RNA and a target DNA (Nishimasu 2014; Anders 2014; and Nishimasu 2015).

[0321] A naturally occurring Cas9 protein comprises two lobes: a recognition (REC) lobe and a nuclease (NUC) lobe; each of which comprise particular structural and/or functional domains. The REC lobe comprises an arginine-rich bridge helix (BH) domain, and at least one REC domain (e.g. a REC1 domain and, optionally, a REC2 domain). The REC lobe does not share structural similarity with other known proteins, indicating that it is a unique functional domain. While not wishing to be bound by any theory, mutational analyses suggest specific functional roles for the BH and REC domains: the BH domain appears to play a role in gRNA:DNA recognition, while the REC domain is thought to interact with the repeat:anti-repeat duplex of the gRNA and to mediate the formation of the Cas9/gRNA complex.

[0322] The NUC lobe comprises a RuvC domain, an HNH domain, and a PAM-interacting (PI) domain. The RuvC domain shares structural similarity to retroviral integrase superfamily members and cleaves the non-complementary (i.e. bottom) strand of the target nucleic acid. It may be formed from two or more split RuvC motifs (such as RuvC I, RuvCII, and RuvCIII in S. pyogenes and S. aureus). The HNH domain, meanwhile, is structurally similar to HNN endonuclease motifs, and cleaves the complementary (i.e. top) strand of the target nucleic acid. The PI domain, as its name suggests, contributes to PAM specificity. Examples of polypeptide sequences encoding Cas9 RuvC-like and Cas9 HNH-like domains that may be used according to the embodiments herein are set forth in SEQ ID NOs:15-23, 52-123 (RuvC-like domains) and SEQ ID NOs:24-28, 124-198 (HNH-like domains).

[0323] While certain functions of Cas9 are linked to (but not necessarily fully determined by) the specific domains set forth above, these and other functions may be mediated or influenced by other Cas9 domains, or by multiple domains on either lobe. For instance, in S. pyogenes Cas9, as described in Nishimasu 2014, the repeat:antirepeat duplex of the gRNA falls into a groove between the REC and NUC lobes, and nucleotides in the duplex interact with amino acids in the BH, PI, and REC domains. Some nucleotides in the first stem loop structure also interact with amino acids in multiple domains (PI, BH and REC1), as do some nucleotides in the second and third stem loops (RuvC and PI domains). Examples of polypeptide sequences encoding Cas9 molecules that may be used according to the embodiments herein are set forth in SEQ ID NOs:1-2, 4-6, 12, and 14.

### Cpf1

[0324] The crystal structure of Acidaminococcus sp. Cpf1 in complex with crRNA and a double-stranded (ds) DNA target including a TTTN PAM sequence has been solved by Yamano 2016 (incorporated by reference herein). Cpf1, like Cas9, has two lobes: a REC (recognition) lobe, and a NUC (nuclease) lobe. The REC lobe includes REC1 and REC2 domains, which lack similarity to any known protein structures. The NUC lobe, meanwhile, includes three RuvC domains (RuvC-I, -II and -III) and a BH domain. However, in contrast to Cas9, the Cpf1 REC lobe lacks an HNH domain, and includes other domains that also lack similarity to known protein structures: a structurally unique PI domain, three Wedge (WED) domains (WED-I, -II and -III), and a nuclease (Nuc) domain.

[0325] While Cas9 and Cpf1 share similarities in structure and function, it should be appreciated that certain Cpf1 activities are mediated by structural domains that are not analogous to any Cas9 domains. For instance, cleavage of the complementary strand of the target DNA appears to be mediated by the Nuc domain, which differs sequentially and spatially from the HNH domain of Cas9. Additionally, the non-targeting portion of Cpf1 gRNA (the handle) adopts a pseudoknot structure, rather than a stem loop structure formed by the repeat:antirepeat duplex in Cas9 gRNAs.

[0326] In certain embodiments, a Cpf1 protein may be a modified Cpf1 protein. In certain embodiments, a modified Cpf1 protein may include one or more modifications. In certain embodiments the modifications may be, without limitation, one or more mutations in a Cpf1 nucleotide sequence or Cpf1 amino acid sequence, one or more additional sequences such as a His tag or a nuclear localization signal (NLS), or a combination thereof. In certain embodiments, a modified Cpf1 may also be referred to herein as a Cpf1 variant.

[0327] In certain embodiments, the Cpf1 protein may be derived from a Cpf1 protein selected from the group consisting of Acidaminococcus sp. strain BV3L6 Cpf1 protein (AsCpf1), Lachnospiraceae bacterium ND2006 Cpf1 protein (LbCpf1), and Lachnospiraceae bacterium MA2020 (Lb2Cpf1). In certain embodiments, the Cpf1 protein may comprise a sequence selected from the group consisting of SEQ ID NOs. 1016-1018, having the codon-optimized nucleic acid sequences of SEQ ID NOs. 1019-1021, respectively.

[0328] In certain embodiments, the modified Cpf1 protein may comprise a nuclear localization signal (NLS). For example, but not by way of limitation, NLS sequences useful in connection with the methods and compositions disclosed herein will comprise an amino acid sequence capable of facilitating protein import into the cell nucleus. NLS sequences useful in connection with the methods and compositions disclosed herein are known in the art. Examples of such NLS sequences include the nucleoplasmin NLS having the amino acid sequence: KRPAATKKAGQAKKKK (SEQ ID NO. 1006) and the simian virus 40 “SV40” NLS having the amino acid sequence PKKKRKV (SEQ ID NO. 1007).

[0329] In certain embodiments, the NLS sequence of the modified Cpf1 protein is positioned at or near the C-terminus of the Cpf1 protein sequence. For example, but not by way of limitation, the modified Cpf1 protein can be selected from the following: His-AsCpf1-nNLS (SEQ ID NO. 1000); His-AsCpf1-sNLS (SEQ ID NO. 1008) and His-AsCpf1-sNLS-sNLS (SEQ ID NO. 1001), where “His” refers to a six-histidine purification sequence, “AsCpf1” refers to the Acidaminococcus sp. Cpf1 protein sequence, “nNLS” refers to the nucleoplasmin NLS, and “sNLS” refers to the SV40 NLS. Additional permutations of the identity and C-terminal positions of NLS sequences, e.g., appending two or more nNLS sequences or combinations of nNLS and sNLS sequences (or other NLS sequences), as well as sequences with and without purification sequences, e.g., six-histidine sequences, are within the scope of the instantly disclosed subject matter.

[0330] In certain embodiments, the NLS sequence of the modified Cpf1 protein may be positioned at or near the N-terminus of the Cpf1 protein sequence. For example, but not by way of limitation, the modified Cpf1 protein may be selected from the following: His-sNLS-AsCpf1 (SEQ ID NO. 1009), His-sNLS-sNLS-AsCpf1 (SEQ ID NO. 1010), and sNLS-sNLS-AsCpf1 (SEQ ID NO. 1011). Additional permutations of the identity and N-terminal positions of NLS sequences, e.g., appending two or more nNLS sequences or combinations of nNLS and sNLS sequences (or other NLS sequences), as well as sequences with and without purification sequences, e.g., six-histidine sequences, are within the scope of the instantly disclosed subject matter.

[0331] In certain embodiments, the modified Cpf1 protein may comprise NLS sequences positioned at or near both the N-terminus and C-terminus of the Cpf1 protein sequence. For example, but not by way of limitation, the modified Cpf1 protein may be selected from the following: His-sNLS-AsCpf1-sNLS (SEQ ID NO. 1012) and His-sNLS-sNLS-AsCpf1-sNLS-sNLS (SEQ ID NO. 1013). Additional permutations of the identity and N-terminal/C-terminal positions of NLS sequences, e.g., appending two or more nNLS sequences or combinations of nNLS and sNLS sequences (or other NLS sequences) to either the N-terminal/C-terminal positions, as well as sequences with and without purification sequences, e.g., six-histidine sequences, are within the scope of the instantly disclosed subject matter.

[0332] In certain embodiments, the modified Cpf1 protein may comprise an alteration (e.g., a deletion or substitution) at one or more cysteine residues of the Cpf1 protein sequence. For example, but not by way of limitation, modified Cpf1 protein may comprise an alteration at a position selected from the group consisting of: C65, C205, C334, C379, C608, C674, C1025, and C1248. In certain embodiments, the modified Cpf1 protein may comprise a substitution of one or more cysteine residues for a serine or alanine. In certain embodiments, the modified Cpf1 protein may comprise an alteration selected from the group consisting of: C65S, C205S, C334S, C379S, C608S, C674S, C1025S, and C1248S. In certain embodiments, the modified Cpf1 protein may comprise an alteration selected from the group consisting of: C65A, C205A, C334A, C379A, C608A, C674A, C1025A, and C1248A. In certain embodiments, the modified Cpf1 protein may comprise alterations at positions C334 and C674 or C334, C379, and C674. In certain embodiments, the modified Cpf1 protein may comprise the following alterations: C334S and C674S, or C334S, C379S, and C674S. In certain embodiments, the modified Cpf1 protein may comprise the following alterations: C334A and C674A, or C334A, C379A, and C674A. In certain embodiments, the modified Cpf1 protein may comprise both one or more cysteine residue alteration as well as the introduction of one or more NLS sequences, e.g., His-AsCpf1-nNLS Cys-less (SEQ ID NO. 1014) or His-AsCpf1-nNLS Cys-low (SEQ ID NO. 1015). In various embodiments, the Cpf1 protein comprising a deletion or substitution in one or more cysteine residues exhibits reduced aggregation.

[0333] In certain embodiments, other modified Cpf1 proteins known in the art may be used with the methods and systems described herein. For example, in certain embodiments, the modified Cpf1 may be Cpf1 containing the mutation S542R/K548V/N552R (“Cpf1 RVR”). Cpf1 RVR has been shown to cleave target sites with a TATV PAM. In certain embodiments, the modified Cpf1 may be Cpf1 containing the mutation S542R/K607R (“Cpf1 RR”). Cpf1 RR has been shown to cleave target sites with a TYCV/CCCC PAM.

[0334] In some embodiments, a Cpf1 variant is used herein, wherein the Cpf1 variant comprises mutations at one or more residues of AsCpf1 (Acidaminococcus sp. BV3L6) selected from the group consisting of 11, 12, 13, 14, 15, 16, 17, 34, 36, 39, 40, 43, 46, 47, 50, 54, 57, 58, 111, 126, 127, 128, 129, 130, 131, 132, 133, 134, 135, 136, 157, 158, 159, 160, 161, 162, 163, 164, 165, 166, 167, 168, 169, 170, 171, 172, 173, 174, 175, 176, 177, 178, 532, 533, 534, 535, 536, 537, 538, 539, 540, 541, 542, 543, 544, 545, 546, 547, 548, 549, 550, 551, 552, 553, 554, 555, 556, 565, 566, 567, 568, 569, 570, 571, 572, 573, 574, 575, 592, 593, 594, 595, 596, 597, 598, 599, 600, 601, 602, 603, 604, 605, 606, 607, 608, 609, 610, 611, 612, 613, 614, 615, 616, 617, 618, 619, 620, 626, 627, 628, 629, 630, 631, 632, 633, 634, 635, 636, 637, 638, 642, 643, 644, 645, 646, 647, 648, 649, 651, 652, 653, 654, 655, 656, 676, 679, 680, 682, 683, 684, 685, 686, 687, 688, 689, 690, 691, 692, 693, 707, 711, 714, 715, 716, 717, 718, 719, 720, 721, 722, 739, 765, 768, 769, 773, 777, 778, 779, 780, 781, 782, 783, 784, 785, 786, 870, 871, 872, 873, 874, 875, 876, 877, 878, 879, 880, 881, 882, 883, 884, or 1048 or the corresponding position of an AsCpf1 orthologue, homologue, or variant.

[0335] In certain embodiments, a Cpf1 variant as used herein may include any of the Cpf1 proteins described in International Publication Number WO 2017/184768 A1 by Zhang et al. (“'768 Publication”), which is incorporated by reference herein.

[0336] In certain embodiments, a modified Cpf1 protein (also referred to as a Cpf1 variant) used herein may be encoded by any of the sequences set forth in SEQ ID NOs:1000, 1001, 1008-1018, 1032, 1035-39, 1094-1097, 1107-09 (Cpf1 polypeptide sequences) or SEQ ID NOs:1019-1021, 1110-17 (Cpf1 polynucleotide sequences). Table 20 sets forth exemplary Cpf1 variant amino acid and nucleotide sequences. These sequences are set forth in FIG. 62, which details the positions of six-histidine sequences (underlined letters) and NLS sequences (bolded letters). Additional permutations of the identity and N-terminal/C-terminal positions of NLS sequences, e.g., appending two or more nNLS sequences or combinations of nNLS and sNLS sequences (or other NLS sequences) to either the N-terminal/C-terminal positions, as well as sequences with and without purification sequences, e.g., six-histidine sequences, are within the scope of the instantly disclosed subject matter.

[0337] In certain embodiments, any of the Cpf1 proteins or modified Cpf1 proteins disclosed herein may be complexed with one or more gRNA comprising the targeting domain set forth in SEQ ID NOs 1002 and/or 1004 to alter a CCAAT box target region. In certain embodiments, any of the Cpf1 proteins or modified Cpf1 proteins disclosed herein may be complexed with one or more gRNA comprising a sequence set forth in Table 18 or Table19. In certain embodiments, the modified Cpf1 protein may be His-AsCpf1-nNLS (SEQ ID NO: 1000) or His-AsCpf1-sNLS-sNLS (SEQ ID NO:1001). In certain embodiments, a modified Cpf1 protein used herein may be encoded by any of the sequences set forth in SEQ ID NOs:1000, 1001, 1008-1018, 1032, 1035-39, 1094-1097, 1107-09 (Cpf1 polypeptide sequences) or SEQ ID NOs:1019-1021, 1110-17 (Cpf1 polynucleotide sequences). In certain embodiments, the modified Cpf1 protein may comprise the sequence set forth in SEQ ID NO:1097.

### Modifications of RNA-Guided Nucleases

[0338] The RNA-guided nucleases described above have activities and properties that can be useful in a variety of applications, but the skilled artisan will appreciate that RNA-guided nucleases can also be modified in certain instances, to alter cleavage activity, PAM specificity, or other structural or functional features.

[0339] Turning first to modifications that alter cleavage activity, mutations that reduce or eliminate the activity of domains within the NUC lobe have been described above. Exemplary mutations that may be made in the RuvC domains, in the Cas9 HNH domain, or in the Cpf1 Nuc domain are described in Ran & Hsu 2013 and Yamano 2016, as well as in Cotta-Ramusino. In general, mutations that reduce or eliminate activity in one of the two nuclease domains result in RNA-guided nucleases with nickase activity, but it should be noted that the type of nickase activity varies depending on which domain is inactivated. As one example, inactivation of a RuvC domain of a Cas9 will result in a nickase that cleaves the complementary or top strand as shown below (where C denotes the site of cleavage).

[0340] On the other hand, inactivation of a Cas9 HNH domain results in a nickase that cleaves the bottom or non-complementary strand.

[0341] Modifications of PAM specificity relative to naturally occurring Cas9 reference molecules has been described by Kleinstiver et al. for both S. pyogenes (Kleinstiver 2015a) and S. aureus (Kleinstiver 2015b). Kleinstiver et al. have also described modifications that improve the targeting fidelity of Cas9 (Kleinstiver 2016). Each of these references is incorporated by reference herein.

[0342] RNA-guided nucleases have been split into two or more parts, as described by Zetsche 2015 and Fine 2015 (both incorporated by reference herein).

[0343] RNA-guided nucleases can be, in certain embodiments, size-optimized or truncated, for instance via one or more deletions that reduce the size of the nuclease while still retaining gRNA association, target and PAM recognition, and cleavage activities. In certain embodiments, RNA guided nucleases are bound, covalently or non-covalently, to another polypeptide, nucleotide, or other structure, optionally by means of a linker. Exemplary bound nucleases and linkers are described by Guilinger 2014, incorporated by reference herein for all purposes.

[0344] RNA-guided nucleases also optionally include a tag, such as, but not limited to, a nuclear localization signal to facilitate movement of RNA-guided nuclease protein into the nucleus. In certain embodiments, the RNA-guided nuclease can incorporate C- and/or N-terminal nuclear localization signals. Nuclear localization sequences are known in the art and are described in Maeder and elsewhere.

[0345] The foregoing list of modifications is intended to be exemplary in nature, and the skilled artisan will appreciate, in view of the instant disclosure, that other modifications may be possible or desirable in certain applications. For brevity, therefore, exemplary systems, methods and compositions of the present disclosure are presented with reference to particular RNA-guided nucleases, but it should be understood that the RNA-guided nucleases used may be modified in ways that do not alter their operating principles. Such modifications are within the scope of the present disclosure.

### Nucleic Acids Encoding RNA-Guided Nucleases

[0346] Nucleic acids encoding RNA-guided nucleases, e.g., Cas9, Cpf1 or functional fragments thereof, are provided herein. Examples of nucleic acid sequences encoding Cas9 molecules that may be used according to the embodiments herein are set forth in SEQ ID NOs:3, 7-11, 13. Exemplary nucleic acids encoding RNA-guided nucleases have been described previously (see, e.g., Cong 2013; Wang 2013; Mali 2013; Jinek 2012).

[0347] In some cases, a nucleic acid encoding an RNA-guided nuclease can be a synthetic nucleic acid sequence. For example, the synthetic nucleic acid molecule can be chemically modified. In certain embodiments, an mRNA encoding an RNA-guided nuclease will have one or more (e.g., all) of the following properties: it can be capped; polyadenylated; and substituted with 5-methylcytidine and/or pseudouridine.

[0348] Synthetic nucleic acid sequences can also be codon optimized, e.g., at least one non-common codon or less-common codon has been replaced by a common codon. For example, the synthetic nucleic acid can direct the synthesis of an optimized messenger mRNA, e.g., optimized for expression in a mammalian expression system, e.g., described herein. Examples of codon optimized Cas9 coding sequences are presented in Cotta-Ramusino.

[0349] In addition, or alternatively, a nucleic acid encoding an RNA-guided nuclease may comprise a nuclear localization sequence (NLS). Nuclear localization sequences are known in the art.

### Functional Analysis of Candidate Molecules

[0350] Candidate RNA-guided nucleases, gRNAs, and complexes thereof, can be evaluated by standard methods known in the art. See, e.g. Cotta-Ramusino. The stability of RNP complexes may be evaluated by differential scanning fluorimetry, as described below.

### Differential Scanning Fluorimetry (DSF)

[0351] The thermostability of ribonucleoprotein (RNP) complexes comprising gRNAs and RNA-guided nucleases can be measured via DSF. The DSF technique measures the thermostability of a protein, which can increase under favorable conditions such as the addition of a binding RNA molecule, e.g., a gRNA.

[0352] A DSF assay can be performed according to any suitable protocol, and can be employed in any suitable setting, including without limitation (a) testing different conditions (e.g. different stoichiometric ratios of gRNA: RNA-guided nuclease protein, different buffer solutions, etc.) to identify optimal conditions for RNP formation; and (b) testing modifications (e.g. chemical modifications, alterations of sequence, etc.) of an RNA-guided nuclease and/or a gRNA to identify those modifications that improve RNP formation or stability. One readout of a DSF assay is a shift in melting temperature of the RNP complex; a relatively high shift suggests that the RNP complex is more stable (and may thus have greater activity or more favorable kinetics of formation, kinetics of degradation, or another functional characteristic) relative to a reference RNP complex characterized by a lower shift. When the DSF assay is deployed as a screening tool, a threshold melting temperature shift may be specified, so that the output is one or more RNPs having a melting temperature shift at or above the threshold. For instance, the threshold can be 5-10° C. (e.g. 5°, 6°, 7° 8°, 9°, 10°) or more, and the output may be one or more RNPs characterized by a melting temperature shift greater than or equal to the threshold.

[0353] Two non-limiting examples of DSF assay conditions are set forth below:

[0354] To determine the best solution to form RNP complexes, a fixed concentration (e.g. 2 μM) of Cas9 in water+10× SYPRO Orange® (Life Technologies cat #S-6650) is dispensed into a 384 well plate. An equimolar amount of gRNA diluted in solutions with varied pH and salt is then added. After incubating at room temperature for 10′ and brief centrifugation to remove any bubbles, a Bio-Rad CFX384™ Real-Time System C1000 Touch™ Thermal Cycler with the Bio-Rad CFX Manager software is used to run a gradient from 20° C. to 90° C. with a 1° C. increase in temperature every 10 seconds.

[0355] The second assay consists of mixing various concentrations of gRNA with fixed concentration (e.g. 2 μM) Cas9 in optimal buffer from assay 1 above and incubating (e.g. at RT for 10′) in a 384 well plate. An equal volume of optimal buffer+10× SYPRO Orange® (Life Technologies cat #S-6650) is added and the plate sealed with Microseal® B adhesive (MSB-1001). Following brief centrifugation to remove any bubbles, a Bio-Rad CFX384™ Real-Time System C1000 Touch™ Thermal Cycler with the Bio-Rad CFX Manager software is used to run a gradient from 20° C. to 90° C. with a 1° C. increase in temperature every 10 seconds.

### Genome Editing Strategies

[0356] The genome editing systems described above are used, in various embodiments of the present disclosure, to generate edits in (i.e. to alter) targeted regions of DNA within or obtained from a cell. Various strategies are described herein to generate particular edits, and these strategies are generally described in terms of the desired repair outcome, the number and positioning of individual edits (e.g. SSBs or DSBs), and the target sites of such edits.

[0357] Genome editing strategies that involve the formation of SSBs or DSBs are characterized by repair outcomes including: (a) deletion of all or part of a targeted region; (b) insertion into or replacement of all or part of a targeted region; or (c) interruption of all or part of a targeted region. This grouping is not intended to be limiting, or to be binding to any particular theory or model, and is offered solely for economy of presentation. Skilled artisans will appreciate that the listed outcomes are not mutually exclusive and that some repairs may result in other outcomes. The description of a particular editing strategy or method should not be understood to require a particular repair outcome unless otherwise specified.

[0358] Replacement of a targeted region generally involves the replacement of all or part of the existing sequence within the targeted region with a homologous sequence, for instance through gene correction or gene conversion, two repair outcomes that are mediated by HDR pathways. HDR is promoted by the use of a donor template, which can be single-stranded or double stranded, as described in greater detail below. Single or double stranded templates can be exogenous, in which case they will promote gene correction, or they can be endogenous (e.g. a homologous sequence within the cellular genome), to promote gene conversion. Exogenous templates can have asymmetric overhangs (i.e. the portion of the template that is complementary to the site of the DSB may be offset in a 3′ or 5′ direction, rather than being centered within the donor template), for instance as described by Richardson 2016 (incorporated by reference herein). In instances where the template is single stranded, it can correspond to either the complementary (top) or non-complementary (bottom) strand of the targeted region.

[0359] Gene conversion and gene correction are facilitated, in some cases, by the formation of one or more nicks in or around the targeted region, as described in Ran & Hsu 2013 and Cotta-Ramusino. In some cases, a dual-nickase strategy is used to form two offset SSBs that, in turn, form a single DSB having an overhang (e.g. a 5′ overhang).

[0360] Interruption and/or deletion of all or part of a targeted sequence can be achieved by a variety of repair outcomes. As one example, a sequence can be deleted by simultaneously generating two or more DSBs that flank a targeted region, which is then excised when the DSBs are repaired, as is described in Maeder for the LCA10 mutation. As another example, a sequence can be interrupted by a deletion generated by formation of a double strand break with single-stranded overhangs, followed by exonucleolytic processing of the overhangs prior to repair.

[0361] One specific subset of target sequence interruptions is mediated by the formation of an indel within the targeted sequence, where the repair outcome is typically mediated by NHEJ pathways (including Alt-NHEJ). NHEJ is referred to as an “error prone” repair pathway because of its association with indel mutations. In some cases, however, a DSB is repaired by NHEJ without alteration of the sequence around it (a so-called “perfect” or “scarless” repair); this generally requires the two ends of the DSB to be perfectly ligated. Indels, meanwhile, are thought to arise from enzymatic processing of free DNA ends before they are ligated that adds and/or removes nucleotides from either or both strands of either or both free ends.

[0362] Because the enzymatic processing of free DSB ends may be stochastic in nature, indel mutations tend to be variable, occurring along a distribution, and can be influenced by a variety of factors, including the specific target site, the cell type used, the genome editing strategy used, etc. Even so, it is possible to draw limited generalizations about indel formation: deletions formed by repair of a single DSB are most commonly in the 1-50 bp range, but can reach greater than 100-200 bp. Insertions formed by repair of a single DSB tend to be shorter and often include short duplications of the sequence immediately surrounding the break site. However, it is possible to obtain large insertions, and in these cases, the inserted sequence has often been traced to other regions of the genome or to plasmid DNA present in the cells.

[0363] Indel mutations—and genome editing systems configured to produce indels—are useful for interrupting target sequences, for example, when the generation of a specific final sequence is not required and/or where a frameshift mutation would be tolerated. They can also be useful in settings where particular sequences are preferred, insofar as the certain sequences desired tend to occur preferentially from the repair of an SSB or DSB at a given site. Indel mutations are also a useful tool for evaluating or screening the activity of particular genome editing systems and their components. In these and other settings, indels can be characterized by (a) their relative and absolute frequencies in the genomes of cells contacted with genome editing systems and (b) the distribution of numerical differences relative to the unedited sequence, e.g. ±1, ±2, ±3, etc. As one example, in a lead-finding setting, multiple gRNAs can be screened to identify those gRNAs that most efficiently drive cutting at a target site based on an indel readout under controlled conditions. Guides that produce indels at or above a threshold frequency, or that produce a particular distribution of indels, can be selected for further study and development. Indel frequency and distribution can also be useful as a readout for evaluating different genome editing system implementations or formulations and delivery methods, for instance by keeping the gRNA constant and varying certain other reaction conditions or delivery methods.

### Multiplex Strategies

[0364] Genome editing systems according to this disclosure may also be employed for multiplex gene editing to generate two or more DSBs, either in the same locus or in different loci. Any of the RNA-guided nucleases and gRNAs disclosed herein may be used in genome editing systems for multiplex gene editing. Strategies for editing that involve the formation of multiple DSBs, or SSBs, are described in, for instance, Cotta-Ramusino.

[0365] As disclosed herein, multiple gRNAs may be used in genome editing systems to introduce alterations (e.g., deletions, insertions) into the 13 nt target region of HBG1 and/or HBG2. In certain embodiments, one or more gRNAs comprising a targeting domain set forth in SEQ ID NOs:251-901, 940-942 may be used to introduce alterations in the 13 nt target region of HBG1 and/or HBG2. In other embodiments, multiple gRNAs may be used in genome editing systems to introduce alterations into the CCAAT box target region. In certain embodiments, one or more gRNAs comprising a sequence set forth in SEQ ID NOs:970, 971, 996, 997 may be used to introduce alterations in the CCAAT box target region. In certain embodiments, one or more gRNAs comprising a targeting domain set forth in SEQ ID NOs:1002, 1004 may be used to introduce alterations in the CCAAT box target region. In other embodiments, multiple gRNAs may be used in genome editing systems to introduce alterations into the GATA1 binding motif in BCL11Ae. In certain embodiments, one or more gRNAs comprising a targeting domain set forth in SEQ ID NOs:952-955 may be used to introduce alterations in the GATA1 binding motif in BCL11Ae. Multiple gRNAs may also be used in genome editing systems to introduce alterations into the GATA1 binding motif in BCL11Ae, the CCAAT box target region, the 13 nt target region of HBG1 and/or HBG2, or a combination thereof. In certain embodiments, one or more gRNAs comprising a targeting domain set forth in SEQ ID NOs:952-955 may be used to introduce alterations in the GATA1 binding motif in BCL11Ae and one or more gRNAs comprising a targeting domain set forth in SEQ ID NOs:251-901, 940-942 may be used to introduce alterations in the 13 nt target region of HBG1 and/or HBG2. In certain embodiments, one or more gRNAs comprising a targeting domain set forth in SEQ ID NOs:952-955 may be used to introduce alterations in the GATA1 binding motif in BCL11Ae and one or more gRNAs or gRNAs comprising a targeting domain set forth in SEQ ID NOs:970, 971, 996, 997 may be used to introduce alterations in the CCAAT box target region. In certain embodiments, one or more gRNAs comprising a targeting domain set forth in SEQ ID NOs:952-955 may be used to introduce alterations in the GATA1 binding motif in BCL11Ae and one or more gRNAs comprising a targeting domain set forth in SEQ ID NOs:1002, 1004 may be used to introduce alterations in the CCAAT box target region.

[0366] In certain embodiments, multiple gRNAs and an RNA-guided nuclease may be used in genome editing systems to introduce alterations (e.g., deletions, insertions) into the CCAAT box target region of HBG1 and/or HBG2. In certain embodiments, the RNA-guided nuclease may be a Cas9, modified Cas9 (e.g., D10A), Cpf1, or modified Cpf1.

### Donor Template Design

[0367] Donor template design is described in detail in the literature, for instance in Cotta-Ramusino. DNA oligomer donor templates (oligodeoxynucleotides or ODNs), which can be single stranded (ssODNs) or double-stranded (dsODNs), can be used to facilitate HDR-based repair of DSBs or to boost overall editing rate, and are particularly useful for introducing alterations into a target DNA sequence, inserting a new sequence into the target sequence, or replacing the target sequence altogether.

[0368] Whether single-stranded or double stranded, donor templates generally include regions that are homologous to regions of DNA within or near (e.g. flanking or adjoining) a target sequence to be cleaved. These homologous regions are referred to here as “homology arms,” and are illustrated schematically below:
[0369] [5′ homology arm]-[replacement sequence]-[3′ homology arm].

[0370] The homology arms can have any suitable length (including 0 nucleotides if only one homology arm is used), and 3′ and 5′ homology arms can have the same length, or can differ in length. The selection of appropriate homology arm lengths can be influenced by a variety of factors, such as the desire to avoid homologies or microhomologies with certain sequences such as Alu repeats or other very common elements. For example, a 5′ homology arm can be shortened to avoid a sequence repeat element. In other embodiments, a 3′ homology arm can be shortened to avoid a sequence repeat element. In some embodiments, both the 5′ and the 3′ homology arms can be shortened to avoid including certain sequence repeat elements. In addition, some homology arm designs can improve the efficiency of editing or increase the frequency of a desired repair outcome. For example, Richardson 2016, which is incorporated by reference herein, found that the relative asymmetry of 3′ and 5′ homology arms of single stranded donor templates influenced repair rates and/or outcomes.

[0371] Replacement sequences in donor templates have been described elsewhere, including in Cotta-Ramusino. A replacement sequence can be any suitable length (including zero nucleotides, where the desired repair outcome is a deletion), and typically includes one, two, three or more sequence modifications relative to the naturally-occurring sequence within a cell in which editing is desired. One common sequence modification involves the alteration of the naturally-occurring sequence to repair a mutation that is related to a disease or condition of which treatment is desired. Another common sequence modification involves the alteration of one or more sequences that are complementary to, or then, the PAM sequence of the RNA-guided nuclease or the targeting domain of the gRNA(s) being used to generate an SSB or DSB, to reduce or eliminate repeated cleavage of the target site after the replacement sequence has been incorporated into the target site.

[0372] Where a linear ssODN is used, it can be configured to (i) anneal to the nicked strand of the target nucleic acid, (ii) anneal to the intact strand of the target nucleic acid, (iii) anneal to the plus strand of the target nucleic acid, and/or (iv) anneal to the minus strand of the target nucleic acid. An ssODN may have any suitable length, e.g., about, at least, or no more than 80-200 nucleotides (e.g., 80, 90, 100, 110, 120, 130, 140, 150, 160, 170, 180, 190, or 200 nucleotides).

[0373] It should be noted that a template nucleic acid can also be a nucleic acid vector, such as a viral genome or circular double stranded DNA, e.g., a plasmid. Nucleic acid vectors comprising donor templates can include other coding or non-coding elements. For example, a template nucleic acid can be delivered as part of a viral genome (e.g. in an AAV or lentiviral genome) that includes certain genomic backbone elements (e.g. inverted terminal repeats, in the case of an AAV genome) and optionally includes additional sequences coding for a gRNA and/or an RNA-guided nuclease. In certain embodiments, the donor template can be adjacent to, or flanked by, target sites recognized by one or more gRNAs, to facilitate the formation of free DSBs on one or both ends of the donor template that can participate in repair of corresponding SSBs or DSBs formed in cellular DNA using the same gRNAs. Exemplary nucleic acid vectors suitable for use as donor templates are described in Cotta-Ramusino, which is incorporated by reference.

[0374] Whatever format is used, a template nucleic acid can be designed to avoid undesirable sequences. In certain embodiments, one or both homology arms can be shortened to avoid overlap with certain sequence repeat elements, e.g., Alu repeats, LINE elements, etc.

[0375] In certain embodiments, silent, non-pathogenic SNPs may be included in the ssODN donor template to allow for identification of a gene editing event.

[0376] In certain embodiments, a donor template may be a non-specific template that is non-homologous to regions of DNA within or near a target sequence to be cleaved. In certain embodiments, donor templates for use in targeting the GATA1 binding motif in BCL11Ae may include, without limitation, non-target specific templates that are nonhomologous to regions of DNA within or near the GATA1 binding motif in BCL11Ae. In certain embodiments, donor templates for use in targeting the 13 nt target region may include, without limitation, non-target specific templates that are nonhomologous to regions of DNA within or near the 13 nt target region.

[0377] A donor template or template nucleic acid, as that term is used herein, refers to a nucleic acid sequence which can be used in conjunction with an RNA nuclease molecule and one or more gRNA molecules to alter (e.g., delete, disrupt, or modify) a target DNA sequence. In certain embodiments, the template nucleic acid results in an alteration (e.g., deletion) at the CCAAT box target region of HBG1 and/or HBG2. In certain embodiments, the alteration is a non-naturally occurring alteration. In certain embodiments, the non-naturally occurring alteration at the CCAAT box target region of HBG1 and/or HBG2 may comprise the 18 nt target region, the 11 nt target region, the 4 nt target region, or the 1 nt target region, or a combination thereof. In certain embodiments, the alteration is a naturally occurring alteration. In certain embodiments, the naturally occurring alteration at the CCAAT box target region of HBG1 and/or HBG2 may comprise the 13 nt target region, the c.-117 G>A target region, or a combination thereof. In certain embodiments, the template nucleic acid is an ssODN. In certain embodiments, the ssODN is a positive strand or a negative strand.

[0378] For example, a template nucleic acid for introducing the 18 nt deletion at the 18 nt target region (HBG1 c.-104 to -121, HBG2 c.-104 to -121, or a combination thereof) may comprise a 5′ homology arm, a replacement sequence, and a 3′ homology arm, where the replacement sequence is 0 nucleotides or 0 bp. In certain embodiments, the 5′ homology arm may be about 25 to about 200 nucleotides or more in length, e.g., at least about 25, 50, 75, 100, 125, 150, 175, or 200 nucleotides in length. In certain embodiments, the 5′ homology arm comprises about 50 to 100 bp, e.g., 55 to 95, 60 to 90, 70 to 90, or 80 to 90 bp, homology 5′ of the 18 nt target region. In certain embodiments, the 3′ homology arm may be about 25 to about 200 nucleotides or more in length, e.g., at least about 25, 50, 75, 100, 125, 150, 175, or 200 nucleotides in length. In certain embodiments, the 3′ homology arm comprises about 50 to 100 bp, e.g., 55 to 95, 60 to 90, 70 to 90, or 80 to 90 bp, homology 3′ of the 18 nt target region. In certain embodiments, the 5′ and 3′ homology arms are symmetrical in length. In certain embodiments, the 5′ and 3′ homology arms are asymmetrical in length. In certain embodiments, the template nucleic acid is an ssODN. In certain embodiments, the ssODN is a positive strand. In certain embodiments, the ssODN is a negative strand. In certain embodiments, the ssODN comprises, consists essentially of, or consists of SEQ ID NO:974 (OLI16409) or SEQ ID NO:975 (OLI16410).

[0379] In certain embodiments, a template nucleic acid for introducing the 11 nt deletion at the 11 nt target region (HBG1 c.-105 to -115, HBG2 c.-105 to -115, or a combination thereof) may comprise a 5′ homology arm, a replacement sequence, and a 3′ homology arm, where the replacement sequence is 0 nucleotides or 0 bp. In certain embodiments, the 5′ homology arm may be about 25 to about 200 nucleotides in length, e.g., at least about 25, 50, 75, 100, 125, 150, 175, or 200 nucleotides in length. In certain embodiments, the 5′ homology arm comprises about 50 to 100 bp, e.g., 55 to 95, 60 to 90, 70 to 90, or 80 to 90 bp, homology 5′ of the 11 nt target region. In certain embodiments, the 3′ homology arm may be about 25 to about 200 nucleotides in length, e.g., at least about 25, 50, 75, 100, 125, 150, 175, or 200 nucleotides in length. In certain embodiments, the 3′ homology arm comprises about 50 to 100 bp, e.g., 55 to 95, 60 to 90, 70 to 90, or 80 to 90 bp, homology 3′ of the 11 nt target region. In certain embodiments, the 5′ and 3′ homology arms are symmetrical in length. In certain embodiments, the 5′ and 3′ homology arms are asymmetrical in length. In certain embodiments, the template nucleic acid is an ssODN. In certain embodiments, the ssODN is a positive strand. In certain embodiments, the ssODN is a negative strand. In certain embodiments, the ssODN comprises, consists essentially of, or consists of SEQ ID NO:976 (OLI16411) or SEQ ID NO:978 (OLI16413).

[0380] In certain embodiments, a template nucleic acid for introducing the 4 nt deletion at the 4 nt target region (HBG1 c.-112 to -115, HBG2 c.-112 to -115, or a combination thereof) may comprise a 5′ homology arm, a replacement sequence, and a 3′ homology arm, where the replacement sequence is 0 nucleotides or 0 bp. In certain embodiments, the 5′ homology arm may be about 25 to about 200 nucleotides in length, e.g., at least about 25, 50, 75, 100, 125, 150, 175, or 200 nucleotides in length. In certain embodiments, the 5′ homology arm comprises about 50 to 100 bp, e.g., 55 to 95, 60 to 90, 70 to 90, or 80 to 90 bp, homology 5′ of the 4 nt target region. In certain embodiments, the 3′ homology arm may be about 25 to about 200 nucleotides in length, e.g., at least about 25, 50, 75, 100, 125, 150, 175, or 200 nucleotides in length. In certain embodiments, the 3′ homology arm comprises about 50 to 100 bp, e.g., 55 to 95, 60 to 90, 70 to 90, or 80 to 90 bp, homology 3′ of the 4 nt target region. In certain embodiments, the 5′ and 3′ homology arms are symmetrical in length. In certain embodiments, the 5′ and 3′ homology arms are asymmetrical in length. In certain embodiments, the template nucleic acid is an ssODN. In certain embodiments, the ssODN is a positive strand. In certain embodiments, the ssODN is a negative strand. In certain embodiments, the ssODN comprises, consists essentially of, or consists of SEQ ID NO:984 (OLI16419), SEQ ID NO:985 (OLI16420), SEQ ID NO:986 (OLI16421), SEQ ID NO:987 (OLI16422), SEQ ID NO:988 (OLI16423), SEQ ID NO:989 (OLI16424), SEQ ID NO:990 (OLI16425), SEQ ID NO:991 (OLI16426), SEQ ID NO:992 (OLI16427), SEQ ID NO:993 (OLI16428), SEQ ID NO:994 (OLI16429), or SEQ ID NO:995 (OLI16430).

[0381] In certain embodiments, a template nucleic acid for introducing the 1 nt deletion at the 1 nt target region (HBG1 c.-116, HBG2 c.-116, or a combination thereof) may comprise a 5′ homology arm, a replacement sequence, and a 3′ homology arm, where the replacement sequence is 0 nucleotides or 0 bp. In certain embodiments, the 5′ homology arm may be about 25 to about 200 nucleotides in length, e.g., at least about 25, 50, 75, 100, 125, 150, 175, or 200 nucleotides in length. In certain embodiments, the 5′ homology arm comprises about 50 to 100 bp, e.g., 55 to 95, 60 to 90, 70 to 90, or 80 to 90 bp, homology 5′ of the 1 nt target region. In certain embodiments, the 3′ homology arm may be about 25 to about 200 nucleotides in length, e.g., at least about 25, 50, 75, 100, 125, 150, 175, or 200 nucleotides in length. In certain embodiments, the 3′ homology arm comprises about 50 to 100 bp, e.g., 55 to 95, 60 to 90, 70 to 90, or 80 to 90 bp, homology 3′ of the 1 nt target region. In certain embodiments, the 5′ and 3′ homology arms are symmetrical in length. In certain embodiments, the 5′ and 3′ homology arms are asymmetrical in length. In certain embodiments, the template nucleic acid is an ssODN. In certain embodiments, the ssODN is a positive strand. In certain embodiments, the ssODN is a negative strand. In certain embodiments, the ssODN comprises, consists essentially of, or consists of SEQ ID NO:982 (OLI16417) or SEQ ID NO:983 (OLI16418).

[0382] In certain embodiments, the alteration at the CCAAT box target region recapitulates or is similar to a naturally occurring alteration, such as a 13 nt deletion. In certain embodiments, a template nucleic acid for introducing the 13 nt deletion at the 13 nt target region (HBG1 c.-116, HBG2 c.-116, or a combination thereof) may comprise a 5′ homology arm, a replacement sequence, and a 3′ homology arm, where the replacement sequence is 0 nucleotides or 0 bp. In certain embodiments, the 5′ homology arm may be about 25 to about 200 nucleotides in length, e.g., at least about 25, 50, 75, 100, 125, 150, 175, or 200 nucleotides in length. In certain embodiments, the 5′ homology arm comprises about 50 to 100 bp, e.g., 55 to 95, 60 to 90, 70 to 90, or 80 to 90 bp, homology 5′ of the 13 nt target region. In certain embodiments, the 3′ homology arm may be about 25 to about 200 nucleotides in length, e.g., at least about 25, 50, 75, 100, 125, 150, 175, or 200 nucleotides in length. In certain embodiments, the 3′ homology arm comprises about 50 to 100 bp, e.g., 55 to 95, 60 to 90, 70 to 90, or 80 to 90 bp, homology 3′ of the 13 nt target region. In certain embodiments, the 5′ and 3′ homology arms are symmetrical in length. In certain embodiments, the 5′ and 3′ homology arms are asymmetrical in length. In certain embodiments, the template nucleic acid is an ssODN. In certain embodiments, the ssODN is a positive strand. In certain embodiments, the ssODN is a negative strand. In certain embodiments, the ssODN comprises, consists essentially of, or consists of SEQ ID NO:979 (OLI16414) or SEQ ID NO:977 (OLI16412).

[0383] In certain embodiments, the alteration at the CCAAT box target region recapitulates or is similar to a naturally occurring alteration, such as a substitution from G to A at the -117G>A target region. In certain embodiments, a template nucleic acid for introducing the -117G>A substitution at the -117G>A target region (HBG1 c.-117 G>A, HBG2 c.-117 G>A, or a combination thereof) may comprise a 5′ homology arm, a replacement sequence, and a 3′ homology arm, where the replacement sequence is 0 nucleotides or 0 bp. In certain embodiments, the 5′ homology arm may be about 100 to about 200 nucleotides in length, e.g., at least about 100, 125, 150, 175, or 200 nucleotides in length. In certain embodiments, the 5′ homology arm comprises about 50 to 100 bp, e.g., 55 to 95, 60 to 90, 70 to 90, or 80 to 90 bp, homology 5′ of the -117G>A target region. In certain embodiments, the 3′ homology arm may be about 25 to about 200 nucleotides in length, e.g., at least about 25, 50, 75, 100, 125, 150, 175, or 200 nucleotides in length. In certain embodiments, the 3′ homology arm comprises about 50 to 100 bp, e.g., 55 to 95, 60 to 90, 70 to 90, or 80 to 90 bp, homology 3′ of the -117G>A target region. In certain embodiments, the 5′ and 3′ homology arms are symmetrical in length. In certain embodiments, the 5′ and 3′ homology arms are asymmetrical in length. In certain embodiments, the template nucleic acid is an ssODN. In certain embodiments, the ssODN is a positive strand. In certain embodiments, the ssODN is a negative strand. In certain embodiments, the ssODN comprises, consists essentially of, or consists of SEQ ID NO:980 (OLI16415) or SEQ ID NO:981 (OLI16416).

[0384] In certain embodiments, the 5′ homology arm comprises a 5′ phosphorothioate (PhTx) modification. In certain embodiments, the 3′ homology arm comprises a 3′ PhTx modification. In certain embodiments, the template nucleic acid comprises a 5′ and 3′ PhTx modification.

[0385] In certain embodiments, the ssODNs for introducing alterations (e.g., deletions) at the CCAAT box target region may be used in conjunction with an RNA nuclease and one or more gRNAs that target the CCAAT target region, for example, the gRNAs disclosed in Table 7, Table 10, Table 12, Table 13, Table 18, Table 19.

### Target Cells

[0386] Genome editing systems according to this disclosure can be used to manipulate or alter a cell, e.g., to edit or alter a target nucleic acid. The manipulating can occur, in various embodiments, in vivo or ex vivo.

[0387] A variety of cell types can be manipulated or altered according to the embodiments of this disclosure, and in some cases, such as in vivo applications, a plurality of cell types are altered or manipulated, for example by delivering genome editing systems according to this disclosure to a plurality of cell types. In other cases, however, it may be desirable to limit manipulation or alteration to a particular cell type or types. For instance, it can be desirable in some instances to edit a cell with limited differentiation potential or a terminally differentiated cell, such as a photoreceptor cell in the case of Maeder, in which modification of a genotype is expected to result in a change in cell phenotype. In other cases, however, it may be desirable to edit a less differentiated, multipotent or pluripotent, stem or progenitor cell. By way of example, the cell may be an embryonic stem cell, induced pluripotent stem cell (iPSC), hematopoietic stem/progenitor cell (HSPC), or other stem or progenitor cell type that differentiates into a cell type of relevance to a given application or indication.

[0388] As a corollary, the cell being altered or manipulated is, variously, a dividing cell or a non-dividing cell, depending on the cell type(s) being targeted and/or the desired editing outcome.

[0389] When cells are manipulated or altered ex vivo, the cells can be used (e.g. administered to a subject) immediately, or they can be maintained or stored for later use. Those of skill in the art will appreciate that cells can be maintained in culture or stored (e.g. frozen in liquid nitrogen) using any suitable method known in the art.

### Implementation of Genome Editing Systems: Delivery, Formulations, and Routes of Administration

[0390] As discussed above, the genome editing systems of this disclosure can be implemented in any suitable manner, meaning that the components of such systems, including without limitation the RNA-guided nuclease, gRNA, and optional donor template nucleic acid, can be delivered, formulated, or administered in any suitable form or combination of forms that results in the transduction, expression or introduction of a genome editing system and/or causes a desired repair outcome in a cell, tissue or subject. Tables 3 and 4 set forth several, non-limiting examples of genome editing system implementations. Those of skill in the art will appreciate, however, that these listings are not comprehensive, and that other implementations are possible. With reference to Table 3 in particular, the table lists several exemplary implementations of a genome editing system comprising a single gRNA and an optional donor template. However, genome editing systems according to this disclosure can incorporate multiple gRNAs, multiple RNA-guided nucleases, and other components such as proteins, and a variety of implementations will be evident to the skilled artisan based on the principles illustrated in the table. In the table, [N/A] indicates that the genome editing system does not include the indicated component.

TABLE 3
Genome Editing System Components

| RNA-guided | | Donor | |
|---|---|---|---|
| Nuclease | gRNA | Template | Comments |
| Protein | RNA | [N/A] | An RNA-guided nuclease protein |
| | | | complexed with a gRNA molecule (an |
| | | | RNP complex) |
| Protein | RNA | DNA | An RNP complex as described above |
| | | | plus a single-stranded or double |
| | | | stranded donor template. |
| Protein | DNA | [N/A] | An RNA-guided nuclease protein plus |
| | | | gRNA transcribed from DNA. |
| Protein | DNA | DNA | An RNA-guided nuclease protein plus |
| | | | gRNA-encoding DNA and a separate |
| | | | DNA donor template. |

| | | |
|---|---|---|
| Protein | DNA | An RNA-guided nuclease protein and |
| | | a single DNA encoding both a gRNA |
| | | and a donor template. |

| DNA | | | | A DNA or DNA vector encoding an |
|---|---|---|---|---|
| | | | | RNA-guided nuclease, a gRNA and a |
| | | | | donor template. |
| | DNA | DNA | [N/A] | Two separate DNAs, or two separate |
| | | | | DNA vectors, encoding the RNA- |
| | | | | guided nuclease and the gRNA, |
| | | | | respectively. |
| | DNA | DNA | DNA | Three separate DNAs, or three |
| | | | | separate DNA vectors, encoding the |
| | | | | RNA-guided nuclease, the gRNA and |
| | | | | the donor template, respectively. |

| | | |
|---|---|---|
| DNA | [N/A] | A DNA or DNA vector encoding an |
| | | RNA-guided nuclease and a gRNA |
| DNA | DNA | A first DNA or DNA vector encoding |
| | | an RNA-guided nuclease and a gRNA, |
| | | and a second DNA or DNA vector |
| | | encoding a donor template. |

| | | |
|---|---|---|
| DNA | DNA | A first DNA or DNA vector encoding |
| | | an RNA-guided nuclease and second |
| | | DNA or DNA vector encoding a |
| | | gRNA and a donor template. |

| DNA | | A first DNA or DNA vector encoding |
|---|---|---|
| | DNA | an RNA-guided nuclease and a donor |
| | | template, and a second DNA or DNA |
| | | vector encoding a gRNA |
| DNA | | A DNA or DNA vector encoding an |
| | RNA | RNA-guided nuclease and a donor |
| | | template, and a gRNA |

| | | |
|---|---|---|
| RNA | [N/A] | An RNA or RNA vector encoding an |
| | | RNA-guided nuclease and comprising |
| | | a gRNA |
| RNA | DNA | An RNA or RNA vector encoding an |
| | | RNA-guided nuclease and comprising |
| | | a gRNA, and a DNA or DNA vector |
| | | encoding a donor template. |

[0391] Table 4 summarizes various delivery methods for the components of genome editing systems, as described herein. Again, the listing is intended to be exemplary rather than limiting.

TABLE 4

| | | Delivery | | | |
|---|---|---|---|---|---|
| | | into Non- | | | Type of |
| | | Dividing | Duration of | Genome | Molecule |
| Delivery Vector/Mode | | Cells | Expression | Integration | Delivered |
| Physical (e.g., electroporation, | | YES | Transient | NO | Nucleic Acids |
| particle gun, Calcium Phosphate | | | | | and Proteins |
| transfection, cell compression or | | | | | |
| squeezing) | | | | | |
| Viral | Retrovirus | NO | Stable | YES | RNA |
| | Lentivirus | YES | Stable | YES/NO with | RNA |
| | | | | modifications | |
| | Adenovirus | YES | Transient | NO | DNA |
| | Adeno- | YES | Stable | NO | DNA |
| | Associated Virus | | | | |
| | (AAV) | | | | |
| | Vaccinia Virus | YES | Very | NO | DNA |
| | | | Transient | | |
| | Herpes Simplex | YES | Stable | NO | DNA |
| | Virus | | | | |
| Non-Viral | Cationic | YES | Transient | Depends on | Nucleic Acids |
| | Liposomes | | | what is | and Proteins |
| | | | | delivered | |
| | Polymeric | YES | Transient | Depends on | Nucleic Acids |
| | Nanoparticles | | | what is | and Proteins |
| | | | | delivered | |
| Biological | Attenuated | YES | Transient | NO | Nucleic Acids |
| Non-Viral | Bacteria | | | | |
| Delivery | Engineered | YES | Transient | NO | Nucleic Acids |
| Vehicles | Bacteriophages | | | | |
| | Mammalian | YES | Transient | NO | Nucleic Acids |
| | Virus-like | | | | |
| | Particles | | | | |
| | Biological | YES | Transient | NO | Nucleic Acids |
| | liposomes: | | | | |
| | Erythrocyte | | | | |
| | Ghosts and | | | | |
| | Exosomes | | | | |

### Nucleic Acid-Based Delivery of Genome Editing Systems

[0392] Nucleic acids encoding the various elements of a genome editing system according to the present disclosure can be administered to subjects or delivered into cells by art-known methods or as described herein. For example, RNA-guided nuclease-encoding and/or gRNA-encoding DNA, as well as donor template nucleic acids can be delivered by, e.g., vectors (e.g., viral or non-viral vectors), non-vector based methods (e.g., using naked DNA or DNA complexes), or a combination thereof.

[0393] Nucleic acids encoding genome editing systems or components thereof can be delivered directly to cells as naked DNA or RNA, for instance by means of transfection or electroporation, or can be conjugated to molecules (e.g., N-acetylgalactosamine) promoting uptake by the target cells (e.g., erythrocytes, HSCs). Nucleic acid vectors, such as the vectors summarized in Table 4, can also be used.

[0394] Nucleic acid vectors can comprise one or more sequences encoding genome editing system components, such as an RNA-guided nuclease, a gRNA and/or a donor template. A vector can also comprise a sequence encoding a signal peptide (e.g., for nuclear localization, nucleolar localization, or mitochondrial localization), associated with (e.g., inserted into or fused to) a sequence coding for a protein. As one example, a nucleic acid vectors can include a Cas9 coding sequence that includes one or more nuclear localization sequences (e.g., a nuclear localization sequence from SV40).

[0395] The nucleic acid vector can also include any suitable number of regulatory/control elements, e.g., promoters, enhancers, introns, polyadenylation signals, Kozak consensus sequences, or internal ribosome entry sites (IRES). These elements are well known in the art, and are described in Cotta-Ramusino.

[0396] Nucleic acid vectors according to this disclosure include recombinant viral vectors. Exemplary viral vectors are set forth in Table 4, and additional suitable viral vectors and their use and production are described in Cotta-Ramusino. Other viral vectors known in the art can also be used. In addition, viral particles can be used to deliver genome editing system components in nucleic acid and/or peptide form. For example, “empty” viral particles can be assembled to contain any suitable cargo. Viral vectors and viral particles can also be engineered to incorporate targeting ligands to alter target tissue specificity.

[0397] In addition to viral vectors, non-viral vectors can be used to deliver nucleic acids encoding genome editing systems according to the present disclosure. One important category of non-viral nucleic acid vectors are nanoparticles, which can be organic or inorganic. Nanoparticles are well known in the art, and are summarized in Cotta-Ramusino. Any suitable nanoparticle design can be used to deliver genome editing system components or nucleic acids encoding such components. For instance, organic (e.g. lipid and/or polymer) nonparticles can be suitable for use as delivery vehicles in certain embodiments of this disclosure. Exemplary lipids for use in nanoparticle formulations, and/or gene transfer are shown in Table 5, and Table 6 lists exemplary polymers for use in gene transfer and/or nanoparticle formulations.

TABLE 5
Lipids Used for Gene Transfer

| Lipid | Abbreviation | Feature |
|---|---|---|
| 1,2-Dioleoyl-sn-glycero-3-phosphatidylcholine | DOPC | Helper |
| 1,2-Dioleoyl-sn-glycero-3-phosphatidylethanolamine | DOPE | Helper |
| Cholesterol | | Helper |
| N-[1-(2,3-Dioleyloxy)propyl]N,N,N-trimethylammonium chloride | DOTMA | Cationic |
| 1,2-Dioleoyloxy-3-trimethylammonium-propane | DOTAP | Cationic |
| Dioctadecylamidoglycylspermine | DOGS | Cationic |
| N-(3-Aminopropyl)-N,N-dimethyl-2,3-bis(dodecyloxy)-1- | GAP-DLRIE | Cationic |
| propanaminium bromide | | |
| Cetyltrimethylammonium bromide | CTAB | Cationic |
| 6-Lauroxyhexyl ornithinate | LHON | Cationic |
| 1-(2,3-Dioleoyloxypropyl)-2,4,6-trimethylpyridinium | 2Oc | Cationic |
| 2,3-Dioleyloxy-N-[2(sperminecarboxamido-ethyl]-N,N- | DOSPA | Cationic |
| dimethyl-1-propanaminium trifluoroacetate | | |
| 1,2-Dioleyl-3-trimethylammonium-propane | DOPA | Cationic |
| N-(2-Hydroxyethyl)-N,N-dimethyl-2,3-bis(tetradecyloxy)-1- | MDRIE | Cationic |
| propanaminium bromide | | |
| Dimyristooxypropyl dimethyl hydroxyethyl ammonium bromide | DMRI | Cationic |
| 3β-[N-(N′,N′-Dimethylaminoethane)-carbamoyl]cholesterol | DC-Chol | Cationic |
| Bis-guanidium-tren-cholesterol | BGTC | Cationic |
| 1,3-Diodeoxy-2-(6-carboxy-spermyl)-propylamide | DOSPER | Cationic |
| Dimethyloctadecylammonium bromide | DDAB | Cationic |
| Dioctadecylamidoglicylspermidin | DSL | Cationic |
| rac-[(2,3-Dioctadecyloxypropyl)(2-hydroxyethyl)]- | CLIP-1 | Cationic |
| dimethylammonium chloride | | |
| rac-[2(2,3-Dihexadecyloxypropyl- | CLIP-6 | Cationic |
| oxymethyloxy)ethyl]trimethylammonium bromide | | |
| Ethyldimyristoylphosphatidylcholine | EDMPC | Cationic |
| 1,2-Distearyloxy-N,N-dimethyl-3-aminopropane | DSDMA | Cationic |
| 1,2-Dimyristoyl-trimethylammonium propane | DMTAP | Cationic |
| O,O′-Dimyristyl-N-lysyl aspartate | DMKE | Cationic |
| 1,2-Distearoyl-sn-glycero-3-ethylphosphocholine | DSEPC | Cationic |
| N-Palmitoyl D-erythro-sphingosyl carbamoyl-spermine | CCS | Cationic |
| N-t-Butyl-N0-tetradecyl-3-tetradecylaminopropionamidine | diC14-amidine | Cationic |
| Octadecenolyoxy[ethyl-2-heptadecenyl-3 hydroxyethyl] | DOTIM | Cationic |
| imidazolinium chloride | | |
| N1-Cholesteryloxycarbonyl-3,7-diazanonane-1,9-diamine | CDAN | Cationic |
| 2-(3-[Bis(3-amino-propyl)-amino]propylamino)-N- | RPR209120 | Cationic |
| ditetradecylcarbamoylme-ethyl-acetamide | | |
| 1,2-dilinoleyloxy-3-dimethylaminopropane | DLinDMA | Cationic |
| 2,2-dilinoleyl-4-dimethylaminoethyl-[1,3]-dioxolane | DLin-KC2-DMA | Cationic |
| dilinoleyl-methyl-4-dimethylaminobutyrate | DLin-MC3-DMA | Cationic |

TABLE 6
Polymers Used for Gene Transfer

| Polymer | Abbreviation |
|---|---|
| Poly(ethylene)glycol | PEG |
| Polyethylenimine | PEI |
| Dithiobis(succinimidylpropionate) | DSP |
| Dimethyl-3,3′-dithiobispropionimidate | DTBP |
| Poly(ethylene imine) biscarbamate | PEIC |
| Poly(L-lysine) | PLL |
| Histidine modified PLL | |
| Poly(N-vinylpyrrolidone) | PVP |
| Poly(propylenimine) | PPI |
| Poly(amidoamine) | PAMAM |
| Poly(amido ethylenimine) | SS-PAEI |
| Triethylenetetramine | TETA |
| Poly(β-aminoester) | |
| Poly(4-hydroxy-L-proline ester) | PHP |
| Poly(allylamine) | |
| Poly(α-[4-aminobutyl]-L-glycolic acid) | PAGA |
| Poly(D,L-lactic-co-glycolic acid) | PLGA |
| Poly(N-ethyl-4-vinylpyridinium bromide) | |
| Poly(phosphazene)s | PPZ |
| Poly(phosphoester)s | PPE |
| Poly(phosphoramidate)s | PPA |
| Poly(N-2-hydroxypropylmethacrylamide) | pHPMA |
| Poly (2-(dimethylamino)ethyl methacrylate) | pDMAEMA |
| Poly(2-aminoethyl propylene phosphate) | PPE-EA |
| Chitosan | |
| Galactosylated chitosan | |
| N-Dodacylated chitosan | |
| Histone | |
| Collagen | |
| Dextran-spermine | D-SPM |

[0398] Non-viral vectors optionally include targeting modifications to improve uptake and/or selectively target certain cell types. These targeting modifications can include e.g., cell specific antigens, monoclonal antibodies, single chain antibodies, aptamers, polymers, sugars (e.g., N-acetylgalactosamine (GalNAc)), and cell penetrating peptides. Such vectors also optionally use fusogenic and endosome-destabilizing peptides/polymers, undergo acid-triggered conformational changes (e.g., to accelerate endosomal escape of the cargo), and/or incorporate a stimuli-cleavable polymer, e.g., for release in a cellular compartment. For example, disulfide-based cationic polymers that are cleaved in the reducing cellular environment can be used.

[0399] In certain embodiments, one or more nucleic acid molecules (e.g., DNA molecules) other than the components of a genome editing system, e.g., the RNA-guided nuclease component and/or the gRNA component described herein, are delivered. In certain embodiments, the nucleic acid molecule is delivered at the same time as one or more of the components of the Genome editing system. In certain embodiments, the nucleic acid molecule is delivered before or after (e.g., less than about 30 minutes, 1 hour, 2 hours, 3 hours, 6 hours, 9 hours, 12 hours, 1 day, 2 days, 3 days, 1 week, 2 weeks, or 4 weeks) one or more of the components of the Genome editing system are delivered. In certain embodiments, the nucleic acid molecule is delivered by a different means than one or more of the components of the genome editing system, e.g., the RNA-guided nuclease component and/or the gRNA component, are delivered. The nucleic acid molecule can be delivered by any of the delivery methods described herein. For example, the nucleic acid molecule can be delivered by a viral vector, e.g., an integration-deficient lentivirus, and the RNA-guided nuclease molecule component and/or the gRNA component can be delivered by electroporation, e.g., such that the toxicity caused by nucleic acids (e.g., DNAs) can be reduced. In certain embodiments, the nucleic acid molecule encodes a therapeutic protein, e.g., a protein described herein. In certain embodiments, the nucleic acid molecule encodes an RNA molecule, e.g., an RNA molecule described herein.

Delivery of RNPs and/or RNA Encoding Genome Editing System Components

[0400] RNPs (complexes of gRNAs and RNA-guided nucleases) and/or RNAs encoding RNA-guided nucleases and/or gRNAs, can be delivered into cells or administered to subjects by art-known methods, some of which are described in Cotta-Ramusino. In vitro, RNA-guided nuclease-encoding and/or gRNA-encoding RNA can be delivered, e.g., by microinjection, electroporation, transient cell compression or squeezing (see, e.g., Lee 2012). Lipid-mediated transfection, peptide-mediated delivery, GalNAc- or other conjugate-mediated delivery, and combinations thereof, can also be used for delivery in vitro and in vivo. A protective, interactive, non-condensing (PINC) system may be used for delivery.

[0401] In vitro delivery via electroporation comprises mixing the cells with the RNA encoding RNA-guided nucleases and/or gRNAs, with or without donor template nucleic acid molecules, in a cartridge, chamber or cuvette and applying one or more electrical impulses of defined duration and amplitude. Systems and protocols for electroporation are known in the art, and any suitable electroporation tool and/or protocol can be used in connection with the various embodiments of this disclosure.

### Route of Administration

[0402] Genome editing systems, or cells altered or manipulated using such systems, can be administered to subjects by any suitable mode or route, whether local or systemic. Systemic modes of administration include oral and parenteral routes. Parenteral routes include, by way of example, intravenous, intramarrow, intrarterial, intramuscular, intradermal, subcutaneous, intranasal, and intraperitoneal routes. Components administered systemically can be modified or formulated to target, e.g., HSCs, hematopoietic stem/progenitor cells, or erythroid progenitors or precursor cells.

[0403] Local modes of administration include, by way of example, intramarrow injection into the trabecular bone or intrafemoral injection into the marrow space, and infusion into the portal vein. In certain embodiments, significantly smaller amounts of the components (compared with systemic approaches) can exert an effect when administered locally (for example, directly into the bone marrow) compared to when administered systemically (for example, intravenously). Local modes of administration can reduce or eliminate the incidence of potentially toxic side effects that may occur when therapeutically effective amounts of a component are administered systemically.

[0404] Administration can be provided as a periodic bolus (for example, intravenously) or as continuous infusion from an internal reservoir or from an external reservoir (for example, from an intravenous bag or implantable pump). Components can be administered locally, for example, by continuous release from a sustained release drug delivery device.

[0405] In addition, components can be formulated to permit release over a prolonged period of time. A release system can include a matrix of a biodegradable material or a material which releases the incorporated components by diffusion. The components can be homogeneously or heterogeneously distributed within the release system. A variety of release systems can be useful, however, the choice of the appropriate system will depend upon rate of release required by a particular application. Both non-degradable and degradable release systems can be used. Suitable release systems include polymers and polymeric matrices, non-polymeric matrices, or inorganic and organic excipients and diluents such as, but not limited to, calcium carbonate and sugar (for example, trehalose). Release systems may be natural or synthetic. However, synthetic release systems are preferred because generally they are more reliable, more reproducible and produce more defined release profiles. The release system material can be selected so that components having different molecular weights are released by diffusion through or degradation of the material.

[0406] Representative synthetic, biodegradable polymers include, for example: polyamides such as poly(amino acids) and poly(peptides); polyesters such as poly(lactic acid), poly(glycolic acid), poly(lactic-co-glycolic acid), and poly(caprolactone); poly(anhydrides); polyorthoesters; polycarbonates; and chemical derivatives thereof (substitutions, additions of chemical groups, for example, alkyl, alkylene, hydroxylations, oxidations, and other modifications routinely made by those skilled in the art), copolymers and mixtures thereof. Representative synthetic, non-degradable polymers include, for example: polyethers such as poly(ethylene oxide), poly(ethylene glycol), and poly(tetramethylene oxide); vinyl polymers-polyacrylates and polymethacrylates such as methyl, ethyl, other alkyl, hydroxyethyl methacrylate, acrylic and methacrylic acids, and others such as poly(vinyl alcohol), poly(vinyl pyrolidone), and poly(vinyl acetate); poly(urethanes); cellulose and its derivatives such as alkyl, hydroxyalkyl, ethers, esters, nitrocellulose, and various cellulose acetates; polysiloxanes; and any chemical derivatives thereof (substitutions, additions of chemical groups, for example, alkyl, alkylene, hydroxylations, oxidations, and other modifications routinely made by those skilled in the art), copolymers and mixtures thereof.

[0407] Poly(lactide-co-glycolide) microsphere can also be used. Typically the microspheres are composed of a polymer of lactic acid and glycolic acid, which are structured to form hollow spheres. The spheres can be approximately 15-30 microns in diameter and can be loaded with components described herein. In some embodiments, genome editing systems, system components and/or nucleic acids encoding system components, are delivered with a block copolymer such as a poloxamer or a poloxamine.

### Multi-Modal or Differential Delivery of Components

[0408] Skilled artisans will appreciate, in view of the instant disclosure, that different components of genome editing systems disclosed herein can be delivered together or separately and simultaneously or non-simultaneously. Separate and/or asynchronous delivery of genome editing system components can be particularly desirable to provide temporal or spatial control over the function of genome editing systems and to limit certain effects caused by their activity.

[0409] Different or differential modes as used herein refer to modes of delivery that confer different pharmacodynamic or pharmacokinetic properties on the subject component molecule, e.g., a RNA-guided nuclease molecule, gRNA, template nucleic acid, or payload. For example, the modes of delivery can result in different tissue distribution, different half-life, or different temporal distribution, e.g., in a selected compartment, tissue, or organ.

[0410] Some modes of delivery, e.g., delivery by a nucleic acid vector that persists in a cell, or in progeny of a cell, e.g., by autonomous replication or insertion into cellular nucleic acid, result in more persistent expression of and presence of a component. Examples include viral, e.g., AAV or lentivirus, delivery.

[0411] By way of example, the components of a genome editing system, e.g., a RNA-guided nuclease and a gRNA, can be delivered by modes that differ in terms of resulting half-life or persistent of the delivered component the body, or in a particular compartment, tissue or organ. In certain embodiments, a gRNA can be delivered by such modes. The RNA-guided nuclease molecule component can be delivered by a mode which results in less persistence or less exposure to the body or a particular compartment or tissue or organ.

[0412] More generally, in certain embodiments, a first mode of delivery is used to deliver a first component and a second mode of delivery is used to deliver a second component. The first mode of delivery confers a first pharmacodynamic or pharmacokinetic property. The first pharmacodynamic property can be, e.g., distribution, persistence, or exposure, of the component, or of a nucleic acid that encodes the component, in the body, a compartment, tissue or organ. The second mode of delivery confers a second pharmacodynamic or pharmacokinetic property. The second pharmacodynamic property can be, e.g., distribution, persistence, or exposure, of the component, or of a nucleic acid that encodes the component, in the body, a compartment, tissue or organ.

[0413] In certain embodiments, the first pharmacodynamic or pharmacokinetic property, e.g., distribution, persistence or exposure, is more limited than the second pharmacodynamic or pharmacokinetic property.

[0414] In certain embodiments, the first mode of delivery is selected to optimize, e.g., minimize, a pharmacodynamic or pharmacokinetic property, e.g., distribution, persistence or exposure.

[0415] In certain embodiments, the second mode of delivery is selected to optimize, e.g., maximize, a pharmacodynamic or pharmacokinetic property, e.g., distribution, persistence or exposure.

[0416] In certain embodiments, the first mode of delivery comprises the use of a relatively persistent element, e.g., a nucleic acid, e.g., a plasmid or viral vector, e.g., an AAV or lentivirus. As such vectors are relatively persistent product transcribed from them would be relatively persistent.

[0417] In certain embodiments, the second mode of delivery comprises a relatively transient element, e.g., an RNA or protein.

[0418] In certain embodiments, the first component comprises gRNA, and the delivery mode is relatively persistent, e.g., the gRNA is transcribed from a plasmid or viral vector, e.g., an AAV or lentivirus. Transcription of these genes would be of little physiological consequence because the genes do not encode for a protein product, and the gRNAs are incapable of acting in isolation. The second component, a RNA-guided nuclease molecule, is delivered in a transient manner, for example as mRNA or as protein, ensuring that the full RNA-guided nuclease molecule/gRNA complex is only present and active for a short period of time.

[0419] Furthermore, the components can be delivered in different molecular form or with different delivery vectors that complement one another to enhance safety and tissue specificity.

[0420] Use of differential delivery modes can enhance performance, safety, and/or efficacy, e.g., the likelihood of an eventual off-target modification can be reduced. Delivery of immunogenic components, e.g., Cas9 molecules, by less persistent modes can reduce immunogenicity, as peptides from the bacterially-derived Cas enzyme are displayed on the surface of the cell by MHC molecules. A two-part delivery system can alleviate these drawbacks.

[0421] Differential delivery modes can be used to deliver components to different, but overlapping target regions. The formation active complex is minimized outside the overlap of the target regions. Thus, in certain embodiments, a first component, e.g., a gRNA is delivered by a first delivery mode that results in a first spatial, e.g., tissue, distribution. A second component, e.g., a RNA-guided nuclease molecule is delivered by a second delivery mode that results in a second spatial, e.g., tissue, distribution. In certain embodiments, the first mode comprises a first element selected from a liposome, nanoparticle, e.g., polymeric nanoparticle, and a nucleic acid, e.g., viral vector. The second mode comprises a second element selected from the group. In certain embodiments, the first mode of delivery comprises a first targeting element, e.g., a cell specific receptor or an antibody, and the second mode of delivery does not include that element. In certain embodiments, the second mode of delivery comprises a second targeting element, e.g., a second cell specific receptor or second antibody.

[0422] When the RNA-guided nuclease molecule is delivered in a virus delivery vector, a liposome, or polymeric nanoparticle, there is the potential for delivery to and therapeutic activity in multiple tissues, when it may be desirable to only target a single tissue. A two-part delivery system can resolve this challenge and enhance tissue specificity. If the gRNA and the RNA-guided nuclease molecule are packaged in separated delivery vehicles with distinct but overlapping tissue tropism, the fully functional complex is only be formed in the tissue that is targeted by both vectors.

### Examples

[0423] The principles and embodiments described above are further illustrated by the non-limiting examples that follow:

### Example 1: Screening of S. Pyogenes gRNAs Delivered to K562 Cells as Ribonucleoprotein Complexes for Use in Causing 13 nt Deletions in HBG1 and HBG2 Regulatory Regions

[0424] gRNAs targeting a 26 nt fragment spanning and including the 13 nucleotides at the 13 nt target region of HBG1 and HBG2 were designed by standard methods. After gRNAs were designed in silico and tiered, a subset of the gRNAs were selected and screened for activity and specificity in human K562 cells. The gRNAs selected for screening are set forth in Table 7. Briefly, gRNAs were in vitro transcribed and then complexed with S. pyogenes wildtype (Wt) Cas9 protein to form ribonucleoprotein complexes (RNPs). The gRNAs complexed to S. pyogenes Cas9 protein were modified sgRNAs ((e.g., 5′ ARCA capped and 3′ polyA (20A) tail; Table 7) and target the HBG1 and HBG2 regulatory regions. To allow for direct comparison of the activity of these RNPs in K562 cells and human CD34⁺ cells, RNPs were first delivered to K562 cells by electroporation (Amaxa Nucleofector).

[0425] Three days after RNP electroporation, gDNA was extracted from K562 cells and then the HBG1 and HBG2 loci were PCR amplified from the gDNA. Gene editing was evaluated in the PCR products by T7E1 endonuclease assay analysis. Eight out of nine RNPs supported a high percentage of NHEJ. Sp37 RNP, the only gRNA shown to be active in human CD34⁺ cells (<10% editing in CD34⁺ cells) was highly active in K562 cells, with >60% indels detected at both HBG1 and HBG2 and eight cut in both the HBG1 and HBG2 targeted regions in the promoter sequences (FIG. 3A).

TABLE 7
Selected gRNAs for screening in K562 cells or CD34+ cells

| | Targeting | Targeting | Targeting domain | Targeting domain | |
|---|---|---|---|---|---|
| | domain | domain | sequence plus | sequence plus | |
| gRNA | sequence | sequence | PAM | PAM (NGG) | |
| ID | (RNA) | (DNA) | (NGG) (RNA) | (DNA) | Sense |
| Sp9 | GGCUAUUGGU | GGCTATTGGTCA | GGCUAUUGGUCA | GGCTATTGGTCA | Antisense |
| | CAAGGCA | AGGCA | AGGCAAGG | AGGCAAGG | |
| | (SEQ ID NO: 277) | (SEQ ID NO: 910) | (SEQ ID NO: 920) | (SEQ ID NO: 930) | |
| Sp36 | CAAGGCUAUU | CAAGGCTATTGG | CAAGGCUAUUGG | CAAGGCTATTGG | Antisense |
| | GGUCAAGGCA | TCAAGGCA | UCAAGGCAAGG | TCAAGGCAAGG | |
| | (SEQ ID NO: 338) | (SEQ ID NO: 911) | (SEQ ID NO: 921) | (SEQ ID NO: 931) | |
| Sp40 | UGCCUUGUCA | TGCCTTGTCAAG | UGCCUUGUCAAGG | TGCCTTGTCAAG | Antisense |
| | AGGCUAU | GCTAT | CUAUUGG | GCTATTGG | |
| | (SEQ ID NO: 327) | (SEQ ID NO: 912) | (SEQ ID NO: 922) | (SEQ ID NO: 932) | |
| Sp42 | GUUUGCCUUG | GTTTGCCTTGTC | GUUUGCCUUGUCA | GTTTGCCTTGTC | Antisense |
| | UCAAGGCUAU | AAGGCTAT | AGGCUAUUGG | AAGGCTATTGG | |
| | (SEQ ID NO: 299) | (SEQ ID NO: 913) | (SEQ ID NO: 923) | (SEQ ID NO: 933) | |
| Sp38 | GACCAAUAGC | GACCAATAGCCT | GACCAAUAGCCUU | GACCAATAGCCT | Sense |
| | CUUGACA | TGACA | GACAAGG | TGACAAGG | |
| | (SEQ ID NO: 276) | (SEQ ID NO: 914) | (SEQ ID NO: 924) | (SEQ ID NO: 934) | |
| Sp37 | CUUGACCAAU | CTTGACCAATAG | CUUGACCAAUAGC | CTTGACCAATAG | Sense |
| | AGCCUUGACA | CCTTGACA | CUUGACAAGG | CCTTGACAAGG | |
| | (SEQ ID NO: 333) | (SEQ ID NO: 915) | (SEQ ID NO: 925) | (SEQ ID NO: 935) | |
| Sp4V3 | GUCAAGGCUA | GTCAAGGCTATT | GUCAAGGCUAUU | GTCAAGGCTATT | Antisense |
| | UUGGUCA | GGTCA | GGUCAAGG | GGTCAAGG | |
| | (SEQ ID NO: 278) | (SEQ ID NO: 916) | (SEQ ID NO: 926) | (SEQ ID NO: 936) | |
| Sp35 | CUUGUCAAGG | CTTGTCAAGGCT | CUUGUCAAGGCUA | CTTGTCAAGGCT | Antisense |
| | CUAUUGGUCA | ATTGGTCA | UUGGUCAAGG | ATTGGTCAAGG | |
| | (SEQ ID NO: 339) | (SEQ ID NO: 917) | (SEQ ID NO: 927) | (SEQ ID NO: 937) | |
| Sp41 | UCAAGUUUGC | TCAAGTTTGCCT | UCAAGUUUGCCUU | TCAAGTTTGCCT | Antisense |
| | CUUGUCA | TGTCA | GUCAAGG | TGTCAAGG | |
| | (SEQ ID NO: 310) | (SEQ ID NO: 918) | (SEQ ID NO: 928) | (SEQ ID NO: 938) | |
| Sp34 | UGGUCAAGUU | TGGTCAAGTTTG | UGGUCAAGUUUG | TGGTCAAGTTTG | Antisense |
| | UGCCUUGUCA | CCTTGTCA | CCUUGUCAAGG | CCTTGTCAAGG | |
| | (SEQ ID NO: 340) | (SEQ ID NO: 919) | (SEQ ID NO: 929) | (SEQ ID NO: 939) | |
| Sp85 | AGUAUCCAGU | AGTATCCAGTGA | AGUAUCCAGUGA | AGTATCCAGTGA | Antisense |
| | GAGGCCA | GGCCA | GGCCAGGG | GGCCAGGG | |
| | (SEQ ID NO: 940) | (SEQ ID NO: 943) | (SEQ ID NO: 946) | (SEQ ID NO: 949) | |
| SpA | GGCAAGGCUG | GGCAAGGCTGG | GGCAAGGCUGGCC | GGCAAGGCTGG | Sense |
| | GCCAACCCAU | CCAACCCAT | AACCCAUGGG | CCAACCCATGGG | |
| | (SEQ ID NO: 941) | (SEQ ID NO: 944) | (SEQ ID NO: 947) | (SEQ ID NO: 950) | |
| SpB | UAUUUGCAUU | TATTTGCATTGA | UAUUUGCAUUGA | TATTTGCATTGA | Sense |
| | GAGAUAGUGU | GATAGTGT | GAUAGUGUGGG | GATAGTGTGGG | |
| | (SEQ ID NO: 942) | (SEQ ID NO: 945) | (SEQ ID NO: 948) | (SEQ ID NO: 951) | |

[0426] The HBG1 and HBG2 PCR products for the 1K562 cells that were targeted with the eight active sgRNAs were then analyzed by DNA sequencing analysis and scored for insertions and deletions detected. The deletions were subdivided into precise 13 nt deletions at the target site, 13 nt target site inclusive and proximal small deletions (18-26 nt), 12 nt deletions (i.e., partial deletion) of the 13 nt target site, >26 nt deletions that span a portion of the HPFH target site, and other deletions, e.g., deletions proximal to but outside the HPFH target site. Seven of the eight sgRNAs targeted deletion of the 13 nt (HPFH mutation induction) (FIG. 3B) for HBG1. At least five of the eight sgRNAs also supported targeted deletion of the 13 nt in HBG2 promoter region (FIG. 3C). Note that DNA sequence results for HBG2 in cells treated with HBG Sp34 sgRNA were not available. These data indicate that Cas9 and sgRNA support precise induction of the 13 nt deletions. FIGS. 3B-3C depict examples of the types of deletions observed in target sequences in HBG1.

### Example 2: Cas9 RNP Containing gRNA Targeting the 13 nt Deletion Mutation Supports Gene Editing in Human Hematopoietic Stem/Progenitor Cells

[0427] Of the RNPs containing different gRNAs tested in human cord blood (CB) CD34⁺ cells, only Sp37 resulted in detectable editing at the target site in the HBG1 and HBG2 promoters as determined by T7E1 analysis of indels in HBG1 and HBG2 specific PCR products amplified from gDNA extracted from electroporated CB CD34⁺ cells from a three cord blood donors (FIG. 4A). The average level of editing detected in cells electroporated with Cas9 protein complexed to Sp37 was 5±2% indels at HBG1 and 3±1% indels detected at HBG2 (3 separate experiments, and CB donors).

[0428] Next, three S. pyogenes gRNAs whose target sites are within the HBG promoter (Sp35, Sp36, Sp37) were complexed to wild-type S. pyogenes Cas9 protein to form ribonucleoprotein complexes. These HBG targeted RNPS were electroporated into CB CD34⁺ cells (n=3 donors) and adult mobilized peripheral blood (mPB) CD34⁺ cell donors (n=3 donors). Then the level of insertions/deletions at the target site was analyzed by T7E1 endonuclease analysis of the HBG2 PCR products amplified from genomic DNA extracted from the samples approximately 3 days after Cas9 RNP delivery. Each of these RNPs supported only low level gene editing in both the CB and adult CD34⁺ cells across 3 donors and 3 separate experiments (FIG. 4B).

[0429] To increase gene editing and the occurrence of the 13 nt deletion at the target site, single strand deoxynucleotide donor repair templates (ssODNs) that encoded 87 nt and 89 nt of homology on each side of the targeted deletion site was generated. The ssODNs, either unmodified at the ends (i.e., ssODN1, SEQ ID NO:906, Table 8) or modified to contain phosphorothioates (PhTx) at the 5′ and 3′ ends (i.e., PhTx ssODN1, SEQ ID NO:909, Table 8). The ssODN was designed to ‘encode’ the 13 nt deletion with sequence homology arms engineered flanking this absent sequence to create a perfect deletion.

TABLE 8
Single strand deoxynucleotide donor repair templates (ssODN)

| | SEQ | |
|---|---|---|
| SSODN ID | ID NO | Sequence |
| SSODN1 | 904 | GGGTGCTTCCTTTTATTCTTCATCCCTAGCCAGCCGCCGGCCCCTG |
| 5′ homology arm | | GCCTCACTGGATACTCTAAGACTATTGGTCAAGTTTGCCTT |
| SSODN1 | 905 | GTCAAGGCAAGGCTGGCCAACCCATGGGTGGAGTTTAGCCAGGGAC |
| 3′ homology arm | | CGTTTCAGACAGATATTTGCATTGAGATAGTGTGGGGAAGGGG |
| SSODN1 | 906 | GGGTGCTTCCTTTTATTCTTCATCCCTAGCCAGCCGCCGGCCCCTG |
| | | GCCTCACTGGATACTCTAAGACTATTGGTCAAGTTTGCCTTGTCAA |
| | | GGCAAGGCTGGCCAACCCATGGGTGGAGTTTAGCCAGGGACCGTTT |
| | | CAGACAGATATTTGCATTGAGATAGTGTGGGGAAGGGG |
| PhTx ssODN1 | 907 | G*GGTGCTTCCTTTTATTCTTCATCCCTAGCCAGCCGCCGGCCCCTG |
| 5′ homology arm | | GCCTCACTGGATACTCTAAGACTATTGGTCAAGTTTGCCTT |
| PhTx ssODN1 | 908 | GTCAAGGCAAGGCTGGCCAACCCATGGGTGGAGTTTAGCCAGGGACC |
| 3′ homology arm | | GTTTCAGACAGATATTTGCATTGAGATAGTGTGGGGAAGGG*G |
| PhTx ssODN1 | 909 | G*GGTGCTTCCTTTTATTCTTCATCCCTAGCCAGCCGCCGGCCCCTG |
| | | GCCTCACTGGATACTCTAAGACTATTGGTCAAGTTTGCCTTGTCAAG |
| | | GCAAGGCTGGCCAACCCATGGGTGGAGTTTAGCCAGGGACCGTTTCA |
| | | GACAGATATTTGCATTGAGATAGTGTGGGGAAGGG*G |

The homology arms flanking the deletion are indicated by bold [5′ homology arm] and underline [3′ homology arm]).
Note the absence of the 13 bp sequence in ssODN1 and PhTx ssODN1.
*Represents modification by phosphorothioate.

[0430] ssODN1 and PhTx ssODN1 were co-delivered with RNP targeting HBG containing the Sp37 gRNA (HBG Sp37 RNP) or HBG Sp35 (HBG Sp35 RNP) to CB CD34⁺ cells. Co-delivery of the ssODN donor encoding the 13 nt deletion with HBG Sp35 RNP or HBG Sp37 RNP led to a 6-fold and 5-fold increase in gene editing of the target site, respectively, as determined by T7E1 analysis of the HBG2 PCR product (FIG. 4C). DNA sequencing analysis (Sanger sequencing) of the HBG2 PCR product indicated that 20% gene editing in cells that were treated with HBG Sp37 RNP and the PhTx modified ssODN1, with 15% deletions and 5% insertions (FIG. 4C, lower left panel). Further analysis of the specific type and size of deletions at the target site revealed that 75% of the total deletions detected contained the 13 nt deletion (which included deletion at c. -110 of the CAAT box in the proximal promoter), the absence of which is associated with elevation of HbF expression (FIG. 4C, lower right panel). The remaining ¼ of deletions were partial deletions that did not span the full 13 nt deletion. These data indicate that co-delivery of a homologous ssODN that is engineered to have a deletion supported precise gene editing (deletion) at HBG in human CD34⁺ cells.

### Example 3: Cas9 RNP Targeting the 13 nt Deletion Mutation Supports Gene Editing in Human Adult Mobilized Peripheral Blood Hematopoietic Stem/Progenitor Cells with Increased HBG Expression in Erythroblast Progeny

[0431] To determine whether editing HBG with Cas9 RNP complexed to Sp37 gRNA or Sp35 gRNA (i.e., the gRNAs that target the 13 nt deletion that is associated with HPFH) in the promoter of HBG supports an increase in HBG expression in erythroid progeny of edited CD34⁺ cells, human adult CD34+ cells from mobilized peripheral blood (mPB) were electroporated with the RNPs. Briefly, mPB CD34⁺ cells were prestimulated for 2 days with human cytokines and PGE2 in StemSpan SFEM and then electroporated with Cas9 protein precomplexed to Sp35 and Sp37, respectively. T7E1 analysis of HBG PCR product indicated ˜3% indels detected for mPB CD34⁺ cells treated with RNP complexed to Sp37 while no editing was detected for cells that were treated with RNP complexed to Sp35 (FIG. 5A).

[0432] In order to increase gene editing at the target site and to increase the occurrence of the 13 nt deletion at the target site, PhTx ssODN1 (SEQ ID NO:909) was co-delivered with the precomplexed RNP targeting HBG containing the Sp37 gRNA. Co-delivery of the ssODN donor encoding the 13 nt deletion led to a nearly 2-fold increase in gene editing of the target site (FIG. 5A). To determine whether editing HBG increases production of fetal hemoglobin in erythroid progeny of edited adult CD34⁺ cells, the cells were differentiated into erythroblasts by culture for up to 18 days in the presence of human cytokines (erythropoietin, SCF, IL3), human plasma (Octoplas), and other supplements (hydrocortisone, heparin, transferrin). Over the time course of differentiation, mRNA was collected to evaluate HBG gene expression in the erythroid progeny of RNP treated mPB CD34⁺ cells and donor matched negative (untreated) controls. By day 7 of differentiation, erythroblast progeny of human CD34⁺ cells that were treated with HBG Sp37 RNP and 13 nt deletion encoding ssODN (˜5% indels detected in gDNA from the bulk cell population by T7E1 analysis) exhibited a 2-fold increase in HBG mRNA production (FIG. 5B). Importantly, CD34⁺ cells that were electroporated with HBG RNP maintained their ex vivo hematopoietic activity (i.e., no difference in the quantity or diversity of erythroid and myeloid colonies compared to untreated donor matched CD34⁺ cell negative control), as determined in hematopoietic colony forming cell (CFC) assays (FIG. 6A). Furthermore, the erythroblasts differentiated from RNP treated CD34⁺ cells maintained the kinetics of differentiation observed for donor matched untreated control cells as determined by flow analysis for acquisition of erythroid phenotype (% Glycophorin A⁺ cells) (FIG. 6B). These data indicate that targeted disruption of HBG1/HBG2 proximal promoter region supported an increase in HBG expression in erythroid progeny of RNP treated adult hematopoietic stem/progenitor cells without altering differentiation potential.

### Example 4: Cas9 RNP Targeting the HPFH Mutation Supports Gene Editing in Human Adult Mobilized Peripheral Blood Hematopoietic Stem/Progenitor Cells with Increased HBG Expression in Erythroblast Progeny

[0433] To determine whether co-delivery of paired nickase RNPs targeting HBG would increase targeted disruption of the proximal HBG promoter, mPB CD34⁺ cells were cultured for 2 days with human cytokines and PGE2 in StemSpan SFEM and then electroporated with S. pyogenes D10A Cas9 protein precomplexed to two gRNAs that target sites flanking the site of the 13 nt deletion. The targeting domain sequences for gRNAs used in nickase pairs in this example (including, without limitation, SpA, Sp85 and SpB) are presented in Table 7. D10A nickase pairs were selected such that the PAMs for the targets were oriented outward and the distance between the cut sites were <100 nt. gRNAs were complexed with D10A Cas9 protein to form RNP complexes and then human CD34⁺ cells and paired nickase were subject to electroporation. To determine whether co-delivery of an ssODN that encoded the 13 nt deletion would increase editing and introduction of the mutation into the cells, in some experiments, ssODN1 was added to the cell RNP mixture prior to electroporation. Approximately 3 days after electroporation, gDNA was extracted from the RNP treated cells and analyzed by T7E1 endonuclease assay and/or Sanger DNA sequencing of HBG2 PCR products amplified from the extracted gDNA. Of the three D10A nickase pairs tested, indels detected by T7E1 endonuclease analysis were increased for one nickase pair (gRNAs SpA+Sp85) samples for which ssODN1 was included (FIG. 7A). DNA sequencing analysis was performed on limited samples shown in FIG. 7A. DNA sequencing analysis showed up to ˜27% indels at the target site, with insertions as the dominant indel detected, followed by deletions of the targeted region (area between the cut sites of the paired nickases), and the 13 nt deletion mutation was also detected at a frequency of 2-3% when ssODN1 encoding the deletion was co-delivered (FIG. 7B). Silent, non-pathogenic SNPs were included in the ssODN1 donor template, and were detected in the sequences that contained the 13 nt deletion, indicating that creation of the HFPH mutation occurred through an HDR event.

### Example 5: D10a Paired RNPs Electroporated into Adult CD34+ Cells Supports Induction of HbF Protein in Erythroid Progeny

[0434] To further optimize editing conditions in mPB CD34⁺ cells at the target site and to evaluate editing in additional human cell donors, human mPB CD34⁺ cells were electroporated with D10A Cas9 and WT Cas9 paired RNPs targeting HBG. The most efficient guide pair for both D10A Cas9 and WT Cas9 RNPs was Sp37+SpA, which supported >30% indels as determined by T7E1 endonuclease analysis of HBG2 PCR products (FIG. 8A). Given that editing at both HBG1 and HBG2 could result in large deletions of HBG2 and the intergenic region between HBG2 and HBG1, indels were further characterized in order to capture local indels by T7E1 endonuclease assay and sequencing and large deletion by ddPCR analysis. Large deletions were detected in all samples at variable frequencies for both D10A Cas9 and WT Cas9 RNP nickase pairs (FIG. 8B). Illumina sequencing analysis of indels correlated with indels determined by T7E1 analysis (FIG. 8C-8D).

[0435] To determine whether CD34⁺ cells edited with dual nickases at the HBG promoter gave rise to erythroid progeny with elevated HbF expression, donor matched RNP treated and untreated controls were induced toward erythroid differentiation and then evaluated for maintenance of indels during differentiation and for expression of HbF mRNA and protein. The level of editing (as determined by T7E1 endonuclease assay) was evaluated over the first 2 weeks of erythroid differentiation in the progeny of RNP treated cells prior to enucleation. Indels were detected in the erythroid progeny at every time point assayed suggesting that the editing that occurred in the CD34⁺ cells was maintained during erythroid differentiation and that edited CD34⁺ cells maintain erythroid differentiation potential.

[0436] The levels of HBG mRNA (day 10 of differentiation) and HbF protein (day 20-23 of differentiation) were quantified by ddPCR and HPLC analysis (according to the HPLC method described in Chang 2017 at pp. 143-44, incorporated by reference herein), respectively (FIG. 9). A ˜2-fold increase (+40% in in HBG transcripts vs. unedited donor matched control) was observed for HBG:HBA ratio (data not shown) and the ratio of HbF/HbF+HbA (i.e. HBG mRNA/HGB+HBB mRNA) increased to 30% above the level detected in donor matched untreated control samples.

[0437] For the D10A Cas9 nickase pairs, upregulation of HbF mRNA and protein was detected in erythroid progeny (FIG. 9). With respect to HbF protein analysis, two pairs supported 20% HbF induction for two D10A nickase pairs. No HbF upregulation was detected in erythroid progeny of WT Cas9 RNP treated CD34⁺ cells (data not shown).

### Example 6: Increasing the Dose of RNP Increases Total Editing Efficiency in Human Adult CD34⁺ Cells at the HBG Locus

[0438] The concentration of D10A Cas9 RNP for the nickase pair SpA+Sp85 was increased (2.5 μM standard concentration and 3.7 μM) and delivered to mPB CD34⁺ cells by electroporation. The increased RNP concentration supported an increase in indels at the HBG target site to >30% (FIG. 10A) as determined by T7E1 endonuclease analysis of the HBG PCR product amplified for gDNA extracted 3 days after electroporation of CD34⁺ cells. Sequencing analysis indicated that increasing the RNP concentration increased insertions (FIG. 10B). Erythroid progeny of RNP treated CD34⁺ cells also had an increase in HbF protein production (FIG. 10C). Importantly, the hematopoietic colony forming potential was maintained after editing (FIG. 10D). These cells were then transplanted into immunodeficient mice and their engraftment 1 month (FIG. 10E) and 2 months (FIG. 10F) after transplantation was evaluated by sampling the peripheral blood and measuring the percentage of human CD45⁺ cells. Early engraftment data showed no difference in engraftment between recipient cohorts of donor matched untreated controls (0 μM RNP) and mice transplanted with RNP treated cells. Furthermore, there was no difference in human blood lineage distribution (myeloid, B cell, T cell) within the human CD45+ fraction among cohorts at indicated time points (FIG. 10G-H).

[0439] Two additional D10A nickase pairs were also tested in RNP dose response studies in adult mPB CD34⁺ cells (Sp37+SpA, Sp37+SpB). Here, mPB CD34⁺ cells were electroporated with D10A paired nickases delivered at 0, 2.5, and 3.75 μM of total RNP. RNP treated cells were differentiated into erythroid progeny and the HbF protein levels (% HbF/HbF+HbA) were analyzed by HPLC analysis. The indel frequency detected in CD34⁺ cells was plotted with the HbF levels detected in erythroid progeny in order to correlate editing and HbF induction (FIG. 11A). RNP treated and untreated control mPB CD34⁺ cells were also differentiated into colonies to evaluate ex vivo hematopoietic activity. Colony forming cell (CFC) activity was maintained for the progeny of RNP treated and donor matched untreated control CD34⁺ cells (FIG. 11B). There was no difference in the percentage of human CD45⁺ cells in the mouse peripheral blood 1 month after transplantation and no difference in blood lineage distribution (FIG. 11C-D) for cells exposed to different D10A RNP pairs at different doses compared to untreated donor matched control CD34⁺ cells.

### Example 7: Co-Delivery of RNP Targeting the Erythroid Specific Enhancer of BCL11A and a Non-Specific (N) Single Strand Deoxynucleotide Sequence or Paired RNPs Increases Gene Editing in Human CD34+ Cells and Supports Induction of Fetal Hemoglobin Expression in Erythroid Progeny

[0440] Fetal hemoglobin expression can be induced through targeted disruption of the erythroid cell specific expression of a transcriptional repressor, BCL11A (Canvers 2015). One potential strategy to increase HbF expression through a gene editing strategy is to multiplex gene editing for introduction of 13 nt deletion associated in the HBG proximal promoter and also for targeted disruption of the GATA1 binding motif in the erythroid specific enhancer of BCL11A that is in the +58 DHS region of intron 2 of the BCL11A gene (FIG. 12). In order to accomplish this multiplex strategy to increase HbF expression through multiplex gene editing, the effect of disruption of BCL11A erythroid enhancer (BCL11Ae) must first be determined as a single editing event.

[0441] In this experiment, CB CD34⁺ cells were electroporated with S. pyogenes WT Cas9 complexed to in vitro transcribed sgRNA targeting the GATA1 motif in the +58 DHS region of intron 2 of BCL11A gene (gRNA SpK, Table 9) (FIG. 13A). To determine whether co-delivery of a non-target specific ssODN would increase editing of the target sequence, BCL11Ae RNP was co-delivered with ssODN (which is nonhomologous to the BCL11Ae target sequence) in CB CD34⁺ cells. T7E1 analysis of BCL11A erythroid enhancer PCR product from gDNA extracted from CB CD34⁺ cells treated with BCL11Ae RNP indicated that -5% indels was achieved (FIG. 13A). Co-delivery of BCL11Ae RNP with a non-target specific ssODN increase in indels by 5-fold to 20% as detected by T7E1 endonuclease analysis. Illumina sequencing analysis indicated that >90% of edits had disruption of the GATA1 motif in the +DHS 58 region enhancer in intron 2 of the BCL11A gene (data not shown). To increase editing, human CB CD34⁺ cells were electroporated with WT Cas9 RNP (single gRNAs complexed to WT Cas9) or with WT Cas9 paired RNPs (paired gRNAs complexed to WT Cas9), so that the cut sites in each pair flank the target site for excision of the GATA1 motif (gRNAs SpC, SpK, SpM, SpN) (Table 9). Two of the single gRNAs and two pairs had >50% indels as determined by T7E1 endonuclease analysis (FIG. 13B).

TABLE 9
Select gRNA sequences targeting BCL11A erythroid enhancer for screening in CD34+ cells

| | Targeting | Targeting | Targeting domain | Targeting domain | |
|---|---|---|---|---|---|
| gRNA | domain sequence | domain sequence | sequence plus PAM | sequence plus PAM | |
| ID | (RNA) | (DNA) | (NGG) (RNA) | (NGG) (DNA) | Sense |
| SpK | CUAACAGUUG | CTAACAGTTGC | CUAACAGUUGCU | CTAACAGTTGCT | Antisense |
| | CUUUUAUCAC | TTTTATCAC | UUUAUCACAGG | TTTATCACAGG | |
| | (SEQ ID NO: 952) | (SEQ ID NO: 956) | (SEQ ID NO: 960) | (SEQ ID NO: 964) | |
| SpM | GGGCGUGGGU | GGGCGTGGGT | GGGCGUGGGUGG | GGGCGTGGGTGG | Antisense |
| | GGGGUAGAAG | GGGGTAGAAG | GGUAGAAGAGG | GGTAGAAGAGG | |
| | (SEQ ID NO: 953) | (SEQ ID NO: 957) | (SEQ ID NO: 961) | (SEQ ID NO: 965) | |
| SpN | CUCUUAGACA | CTCTTAGACAT | CUCUUAGACAUA | CTCTTAGACATA | Antisense |
| | UAACACACCA | AACACACCA | ACACACCAGGG | ACACACCAGGG | |
| | (SEQ ID NO: 954) | (SEQ ID NO: 958) | (SEQ ID NO: 962) | (SEQ ID NO: 966) | |
| SpC | AUCAGAGGCC | ATCAGAGGCC | AUCAGAGGCCAA | ATCAGAGGCCAA | Sense |
| | AAACCCUUCC | AAACCCTTCC | ACCCUUCCUGG | ACCCTTCCTGG | |
| | (SEQ ID NO: 955) | (SEQ ID NO: 959) | (SEQ ID NO: 963) | (SEQ ID NO: 967) | |

[0442] Next, human adult bone marrow CD34⁺ cells were electroporated with the BCL11Ae RNP. DNA sequencing analysis of the BCL11A PCR product amplified from gDNA extracted from marrow CD34+ cells indicated 15% gene editing comprised of insertions and deletions (FIG. 14A). Importantly, all deletions resulted in deletion of the GATA1 motif and all insertions disrupted GATA1 motif through addition of a small number of bp in the motif. CD34⁺ cells were plated into colony forming assays and the mixed hematopoietic colonies (GEMMs), which correspond to CD34⁺ cell clones, were picked. gDNA was isolated and analyzed by Illumina sequencing to quantify monoallelic and biallelic disruption of the target site. Most GEMMs differentiated from the CD34⁺ cell clones had monoallelic disruption and biallelic disruption was also detected, with the overall indel rate ˜⅔ higher compared to what was detected in the bulk CD34⁺ cell population (FIG. 14B). This was likely a reflection of the percentage of common myeloid progenitors (CMPs) that give rise to GEMMs that make up a larger fraction of the heterogenous CD34⁺ cells versus the other lineages present, but not captured/differentiated in the short-term CFC assays. The RNP treated marrow CD34⁺ cells also maintained similar kinetics of erythroid maturation (enucleation, FIG. 14C) and differentiation (phenotype acquisition, FIG. 14D) compared to donor matched untreated control cells. Erythroid progeny of edited marrow CD34⁺ cells exhibited ˜5-fold increase in HbF induction as determined by flow cytometry analysis (FIG. 14E).

[0443] Gene editing and induction of fetal hemoglobin was also evaluated in human adult mPB CD34+ cells. Co-delivery of BCL11Ae RNP and nonspecific ssODN supported ˜20% indels at the target site (FIG. 15A). To evaluate early induction of fetal hemoglobin in erythroid progeny of edited cells, mPB CD34⁺ cells were differentiated into erythroblasts and induction of fetal hemoglobin transcription (HBG mRNA) was evaluated by qRT-PCR analysis. The erythroid progeny of BCL11Ae RNP treated CD34⁺ cells exhibited a 2-fold induction of HBG mRNA compared to untreated controls, suggesting induction of fetal hemoglobin expression (FIG. 15B). The RNP treated marrow CD34⁺ cells also maintained similar kinetics of differentiation (phenotype acquisition, FIG. 15C) compared to donor matched untreated control cells.

### Example 8: Electroporation of Cas9 RNP Targeting the Distal CCAAT Box at the HBG Promoter in Human Hematopoietic Stem/Progenitor Cells Generates Several Deletions that Promote HBG Expression after Erythroid Differentiation

[0444] Hereditary persistence of fetal hemoglobin (HPFH phenotype) is observed in patients carrying a 13 nt deletion overlapping with the HBG distal CCAAT box. Cas9-RNP targeting the HBG distal CCAAT box can be used in hematopoietic stem/progenitor cells (HSPCs) to reproduce the HPFH phenotype, likely by disrupting the binding sites of transcription factors repressing HBG expression. DNA double strand breaks (DSBs) created by Cas9 RNP can lead to a variety of repair outcomes, including insertions and deletions proximal to the RNP cut site. Some of the introduced indels may disrupt the binding of repressing factors less efficiently. It was envisioned that ssODN donor templates could be used to improve the frequency of indels reproducing the HPFH phenotype by directing the repair towards specific deletions that leads to HBG gene expression.

[0445] To evaluate the repair outcome of Cas9-RNP targeting the distal CCAAT box at the HBG promoter, Cas9 was complexed with the chemically synthesized guide RNA OLI7066 (SEQ ID NO:970, Table 10) (“OLI7066-RNP”) and RNP were electroporated into HSPCs at 16 μM. Sequencing analysis (next generation sequencing) performed at day 2 post-electroporation indicated that 23.7% of the alleles carried the 13 nt deletion identical to the naturally occurring HPFH mutation (FIG. 16, 13 nt deletion indicated by “Δ-102:-114”). Several other frequent deletions were also observed around the OLI7066-RNP cut site (FIG. 16).

TABLE 10
Sequences of chemically synthesized gRNA targeting the CCAAT box, with or
without end modifications.

| Name | Oli-ID | gRNA sequence (RNA) | gRNA sequence (DNA) |
|---|---|---|---|
| Sp35 | OLI7066 | CUUGUCAAGGCUAUUGGUCAG | CTTGTCAAGGCTATTGGTCA |
| unmodified | | UUUUAGAGCUAGAAAUAGCAA | GTTTTAGAGCTAGAAATAGC |
| | | GUUAAAAUAAGGCUAGUCCGU | AAGTTAAAATAAGGCTAGTC |
| | | UAUCAACUUGAAAAAGUGGCA | CGTTATCAACTTGAAAAAGT |
| | | CCGAGUCGGUGCUUUU (SEQ ID | GGCACCGAGTCGGTGCTTTT |
| | | NO: 970) | (SEQ ID NO: 972) |
| Sp35 5′-3′ | OLI8394 | mC*mU*mU*GUCAAGGCUAUUG | mC*mT*mT*GTCAAGGCTATT |
| PSOMe | | GUCAGUUUUAGAGCUAGAAAU | GGTCAGTTTTAGAGCTAGAA |
| | | AGCAAGUUAAAAUAAGGCUAG | ATAGCAAGTTAAAATAAGGC |
| | | UCCGUUAUCAACUUGAAAAAG | TAGTCCGTTATCAACTTGAA |
| | | UGGCACCGAGUCGGUGCmU*m | AAAGTGGCACCGAGTCGGTG |
| | | U*mU*U (SEQ ID NO: 971) | CmT*mT*mT*T (SEQ ID |
| | | | NO: 973) |

*: Represents phosphorothioate modification
m: Represents 2-o-methyl modification

[0446] A single cell experiment was performed to evaluate the level of HbF expression induced by the most frequent deletions generated by delivery of RNP (Cas9 complexed with the gRNA OLI7066 (SEQ ID NO:970) (“OLI7066-RNP”)) targeting the distal CCAAT box. Briefly, single HSPC electroporated with OLI7066-RNP complexes targeting the distal CCAAT box were plated in single wells and differentiated into erythroid cells by culturing for 18 days in the presence of human cytokines (erythropoietin, SCF, IL3), human plasma (Octoplas), and other supplements (hydrocortisone, heparin, transferrin, insulin). A fraction of the erythroid progeny from each single cell was split after 14 days for gDNA extraction. Sequencing analysis of the PCR product from HBG1 and HBG2 was performed to identify the genotype of each clonal population. ddPCR analysis was also performed on the genomic DNA of each clonal populations to detect deletions of the 4.9 kb fragment between the guide RNA target sites in HBG1 and HBG2. At day 18, the erythroid cells deriving from each clone were lysed and the relative expression of the globin chains was determined by ultra-performance liquid chromatography (UPLC). Finally, the level of G-gamma (Gγ)-globin, Δ-gamma (Aγ)-globin chain expression (or AG-gamma (AGγ)-globin resulting from the 4.9 kb deletion) as determined by [gamma chain]/[all-gamma chains+beta chain] was compared relative to the indels carried at HBG1 and HBG2 respectively. The 13 nt deletion that reproduces the HPFH genotype was shown to induce HBG expression. In addition several unique non-naturally occurring deletions that induced HBG expression at comparable levels were identified. These include HBG Δ-112:-115 (“4 nt deletion”), HBG Δ-104:-121 (“18 nt deletion”), HBG Δ-116 (“1 nt deletion”) (FIGS. 17A-D).

### Example 9: Co-Delivery of Cas9 RNP Targeting the Region at or Near the Distal CCAAT Box with ssODN Donors Supports Precise Gene Editing in Human Hematopoietic Stem/Progenitor Cells and Increased Gamma-Globin Expression in the Erythroid Progeny

[0447] To improve the frequency of HbF inducing indels in HSPC, single strand deoxynucleotide donor repair templates (ssODNs) “encoding” identified HbF inducing deletions (e.g., the “1 nt” (HBG Δ-116) and “4 nt” (HBG Δ-112:-115) deletions) were designed (FIG. 18). ssODNs used to induce these deletions were as follows: “1 nt” ssODNs: OLI16417-18; “4 nt” ssODNs: OLI16424, OLI16430, Table 11). ssODNs were designed with 90 nt homology arms flanking this absent sequence to create a perfect deletion. The ssODNs were modified to contain phosphorothioates (PhTx) at the 5′ and 3′ ends. Additional ssODNs were designed to encode naturally occurring mutations observed in patients with HPFH (e.g., HBGΔ-102:-114 (“13 nt” deletion, FIG. 18) and HBG-117 G>A mutation (“HBG-117 G>A”). ssODNs used to induce these deletions were as follows: “13 nt” ssODN: OLI16412, OLI6414 and “-117 G>A” ssODN: OLI16415-16, Table 11). Finally, to facilitate the evaluation of gene correction, ssODNs (OLI16411, OLI6413, Table 11) were designed to encode an nt deletion overlapping the distal CCAAT box that occurs at low frequency after electroporation of OLI18394-RNP alone (0.1%, see FIG. 19B, FIG. 18).

TABLE 11
Single strand deoxynucleotide donor repair templates “encoding” deletions
or mutations at or near the CCAAT box

| SSODN ID | OLI-ID | Sequence |
|---|---|---|
| Ptx ssODN- | OLI16409 | G*GTGCTTCCTTTTATTCTTCATCCCTAGCCAGCCGCCGGCCCC |
| Positive | | TGGCCTCACTGGATACTCTAAGACTATTGGTCAAGTTTGCCTT |
| Strand-18 nt | | GTCAAGGCTGGCCAACCCATGGGTGGAGTTTAGCCAGGGACC |
| (180) | | GTTTCAGACAGATATTTGCATTGAGATAGTGTGGGGAAGGGG |
| | | CCCCCAAGA*G (SEQ ID NO: 974) |
| Ptx ssODN- | OLI16410 | C*TCTTGGGGGCCCCTTCCCCACACTATCTCAATGCAAATATC |
| Negative | | TGTCTGAAACGGTCCCTGGCTAAACTCCACCCATGGGTTGGCC |
| Strand-18 nt | | AGCCTTGACAAGGCAAACTTGACCAATAGTCTTAGAGTATCC |
| (180) | | AGTGAGGCCAGGGGCCGGCGGCTGGCTAGGGATGAAGAATA |
| | | AAAGGAAGCAC*C (SEQ ID NO: 975) |
| Ptx ssODN- | OLI16411 | G*GCCCCTTCCCCACACTATCTCAATGCAAATATCTGTCTGAA |
| Negative | | ACGGTCCCTGGCTAAACTCCACCCATGGGTTGGCCAGCCTTGC |
| Strand-11 nt | | CTTGAGACAAGGCAAACTTGACCAATAGTCTTAGAGTATCCA |
| (180) | | GTGAGGCCAGGGGCCGGCGGCTGGCTAGGGATGAAGAATAA |
| | | AAGGAAGCACC*C (SEQ ID NO: 976) |
| Ptx ssODN- | OLI16412 | G*GCCCCTTCCCCACACTATCTCAATGCAAATATCTGTCTGAA |
| Negative | | ACGGTCCCTGGCTAAACTCCACCCATGGGTTGGCCAGCCTTGC |
| Strand-13 nt | | CTTGACAAGGCAAACTTGACCAATAGTCTTAGAGTATCCAGT |
| (180) | | GAGGCCAGGGGCCGGCGGCTGGCTAGGGATGAAGAATAAAA |
| | | GGAAGCACCCT*T (SEQ ID NO: 977) |
| Ptx ssODN- | OLI16413 | G*GGTGCTTCCTTTTATTCTTCATCCCTAGCCAGCCGCCGGCCC |
| Positive | | CTGGCCTCACTGGATACTCTAAGACTATTGGTCAAGTTTGCCT |
| Strand-11 nt | | TGTCTCAAGGCAAGGCTGGCCAACCCATGGGTGGAGTTTAGC |
| (180) | | CAGGGACCGTTTCAGACAGATATTTGCATTGAGATAGTGTGG |
| | | GGAAGGGGC*C (SEQ ID NO: 978) |
| Ptx ssODN- | OLI16414 | A*AGGGTGCTTCCTTTTATTCTTCATCCCTAGCCAGCCGCCGGC |
| Positive | | CCCTGGCCTCACTGGATACTCTAAGACTATTGGTCAAGTTTGC |
| Strand-13 nt | | CTTGTCAAGGCAAGGCTGGCCAACCCATGGGTGGAGTTTAGC |
| (180) | | CAGGGACCGTTTCAGACAGATATTTGCATTGAGATAGTGTGG |
| | | GGAAGGGGC*C (SEQ ID NO: 979) |
| Ptx ssODN- | OLI16415 | G*GCCCCTTCCCCACACTATCTCAATGCAAATATCTGTCTGAA |
| Negative | | ACGGTCCCTGGCTAAACTCCACCCATGGGTTGGCCAGCCTTGC |
| Strand 117: | | CTTAACCAATAGCCTTGACAAGGCAAACTTGACCAATAGTCTT |
| G>A (180) | | AGAGTATCCAGTGAGGCCAGGGGCCGGCGGCTGGCTAGGGAT |
| | | GAAGAATAA*A (SEQ ID NO: 980) |
| Ptx ssODN- | OLI16416 | T*TTATTCTTCATCCCTAGCCAGCCGCCGGCCCCTGGCCTCACT |
| Positive | | GGATACTCTAAGACTATTGGTCAAGTTTGCCTTGTCAAGGCTA |
| Strand 117: | | TTGGTTAAGGCAAGGCTGGCCAACCCATGGGTGGAGTTTAGC |
| G>A (180) | | CAGGGACCGTTTCAGACAGATATTTGCATTGAGATAGTGTGG |
| | | GGAAGGGGC*C (SEQ ID NO: 981) |
| Ptx ssODN- | OLI16417 | G*GCCCCTTCCCCACACTATCTCAATGCAAATATCTGTCTGAA |
| Negative | | ACGGTCCCTGGCTAAACTCCACCCATGGGTTGGCCAGCCTTGC |
| Strand-1 nt | | CTTGCCAATAGCCTTGACAAGGCAAACTTGACCAATAGTCTTA |
| (180) | | GAGTATCCAGTGAGGCCAGGGGCCGGCGGCTGGCTAGGGATG |
| | | AAGAATAAA*A (SEQ ID NO: 982) |
| Ptx ssODN- | OLI16418 | T*TTTATTCTTCATCCCTAGCCAGCCGCCGGCCCCTGGCCTCAC |
| Positive | | TGGATACTCTAAGACTATTGGTCAAGTTTGCCTTGTCAAGGCT |
| Strand-1 nt | | ATTGGCAAGGCAAGGCTGGCCAACCCATGGGTGGAGTTTAGC |
| (180) | | CAGGGACCGTTTCAGACAGATATTTGCATTGAGATAGTGTGG |
| | | GGAAGGGGC*C (SEQ ID NO: 983) |
| Ptx ssODN- | OLI16419 | T*GGCTAAACTCCACCCATGGGTTGGCCAGCCTTGCCTTGATA |
| Negative | | GCCTTGACAAGGCAAACTTGACCAATAGTCTTAGAGTATCCA |
| Strand-4 nt | | GTGAGGCCAGGGGCCGGCGGCTGGCTAGGGATGAA*G (SEQ |
| 40/80 (120) | | ID NO: 984) |
| Ptx ssODN- | OLI16420 | C*CACCCATGGGTTGGCCAGCCTTGCCTTGATAGCCTTGACAA |
| Negative | | GGCAAACTTGACCAATAGTCTTAGAGTATCCAGTGAGGCCAG |
| Strand-4 nt | | GGGCCGGCGGCTGGC*T (SEQ ID NO: 985) |
| 30/70 (100) | | |
| Ptx SSODN- | OLI16421 | A*AACGGTCCCTGGCTAAACTCCACCCATGGGTTGGCCAGCCT |
| Negative | | TGCCTTGATAGCCTTGACAAGGCAAACTTGACCAATAGTCTTA |
| Strand-4 nt | | GAGTATCCAGTGAG*G (SEQ ID NO: 986) |
| (100) | | |
| Ptx ssODN- | OLI16422 | T*ATCTGTCTGAAACGGTCCCTGGCTAAACTCCACCCATGGGT |
| Negative | | TGGCCAGCCTTGCCTTGATAGCCTTGACAAGGCAAACTTGACC |
| Strand-4 nt | | AATAGTCTTAGAGTATCCAGTGAGGCCAGGGGCC*G (SEQ ID |
| (120) | | NO: 987) |
| Ptx ssODN- | OLI16423 | T*CAATGCAAATATCTGTCTGAAACGGTCCCTGGCTAAACTCC |
| Negative | | ACCCATGGGTTGGCCAGCCTTGCCTTGATAGCCTTGACAAGGC |
| Strand-4 nt | | AAACTTGACCAATAGTCTTAGAGTATCCAGTGAGGCCAGGGG |
| (140) | | CCGGCGGCTGGC*T (SEQ ID NO: 988) |
| Ptx ssODN- | OLI16424 | G*GCCCCTTCCCCACACTATCTCAATGCAAATATCTGTCTGAA |
| Negative | | ACGGTCCCTGGCTAAACTCCACCCATGGGTTGGCCAGCCTTGC |
| Strand-4 nt | | CTTGATAGCCTTGACAAGGCAAACTTGACCAATAGTCTTAGA |
| (180) | | GTATCCAGTGAGGCCAGGGGCCGGCGGCTGGCTAGGGATGAA |
| | | GAATAAAAGG*A (SEQ ID NO: 989) |
| Ptx ssODN- | OLI16425 | T*ACTCTAAGACTATTGGTCAAGTTTGCCTTGTCAAGGCTATC |
| Positive | | AAGGCAAGGCTGGCCAACCCATGGGTGGAGTTTAGCCAGGGA |
| Strand-4 nt | | CCGTTTCAGACAGATATTTGCATTGAGATAGTGTG*G (SEQ ID |
| 40/80 (120) | | NO: 990) |
| Ptx ssODN- | OLI16426 | C*TATTGGTCAAGTTTGCCTTGTCAAGGCTATCAAGGCAAGGC |
| Positive | | TGGCCAACCCATGGGTGGAGTTTAGCCAGGGACCGTTTCAGA |
| Strand-4 nt | | CAGATATTTGCATTG*A (SEQ ID NO: 991) |
| 30/70 (100) | | |
| Ptx ssODN- | OLI16427 | C*CTCACTGGATACTCTAAGACTATTGGTCAAGTTTGCCTTGTC |
| Positive | | AAGGCTATCAAGGCAAGGCTGGCCAACCCATGGGTGGAGTTT |
| Strand-4 nt | | AGCCAGGGACCGTT*T (SEQ ID NO: 992) |
| (100) | | |
| Ptx ssODN- | OLI16428 | C*GGCCCCTGGCCTCACTGGATACTCTAAGACTATTGGTCAAG |
| Positive | | TTTGCCTTGTCAAGGCTATCAAGGCAAGGCTGGCCAACCCATG |
| Strand-4 nt | | GGTGGAGTTTAGCCAGGGACCGTTTCAGACAGAT*A (SEQ ID |
| (120) | | NO: 993) |
| Ptx ssODN- | OLI16429 | A*GCCAGCCGCCGGCCCCTGGCCTCACTGGATACTCTAAGACT |
| Positive | | ATTGGTCAAGTTTGCCTTGTCAAGGCTATCAAGGCAAGGCTGG |
| Strand-4 nt | | CCAACCCATGGGTGGAGTTTAGCCAGGGACCGTTTCAGACAG |
| (140) | | ATATTTGCATTG*A (SEQ ID NO: 994) |
| Ptx ssODN- | OLI16430 | T*CCTTTTATTCTTCATCCCTAGCCAGCCGCCGGCCCCTGGCCT |
| Positive | | CACTGGATACTCTAAGACTATTGGTCAAGTTTGCCTTGTCAAG |
| Strand-4 nt | | GCTATCAAGGCAAGGCTGGCCAACCCATGGGTGGAGTTTAGC |
| (180) | | CAGGGACCGTTTCAGACAGATATTTGCATTGAGATAGTGTGG |
| | | GGAAGGGGC*C (SEQ ID NO: 995) |
| Ptx ssODN- | OLI16431 | C*CCTGGCCTCACTGGATACTCTAAGACTATTGGTCAAGTTTG |
| Positive | | CCTTGTCAAGGCTGGCCAACCCATGGGTGGAGTTTAGCCAGG |
| Strand-18 nt | | GACCGTTTCAGACAG*A (SEQ ID NO: 1040) |
| (100) | | |

*: Represents phosphorothioate modification

[0448] The ssODN donors, OLI16409-OLI16418, OLI16424 and OLI16430 (Table 11), were co-delivered to adult mPB CD34+ cells with Cas9 protein precomplexed to OLI8394 (“OLI8394-RNP”) or Cas9 protein precomplexed to OLI7066 (“OLI7066-RNP”) targeting the HBG distal CCAAT box (Table 10). Briefly, mPB CD34+ cells were pre-stimulated for 2 days with human cytokines in X-Vivo-10 and then electroporated with a mixture composed of an ssODN donor at 2.5 μM and OLI8394-RNP or OLI7066-RNP at 2 μm. After three days post electroporation the genomic DNA was extracted, and next-generation sequencing was performed on the HBG PCR products. The level of editing was increased from 62.1% when using OLI8394-RNP alone to up to 78.73% when co-delivering “−11” ssODN (i.e., OLI16411 or OLI16413) (FIG. 19A). The level of gene correction mediated by the co-delivery of the ssODN templates to human HSPC was shown to contribute to up to 42.4% of total indels as measured by the frequency of the “−11” deletion within total indels detected by sequencing of the HBG PCR product from HSPC electroporated with OLI8394-RNP+“11” ssODN (FIG. 19B). Efficient gene correction was observed across other ssODN templates and OLI8394-RNP (FIGS. 19C-E, G) or OLI7066-RNP (FIG. 19F).

[0449] The mPB CD34+ cells electroporated with OLI8394-RNP or OLI7066-RNP co-delivered with ssODN templates were differentiated into erythroid cells to evaluate the level of gamma-globin expression resulting from the gene editing. To determine whether co-delivering RNP with ssODNs increased the production of fetal hemoglobin in the erythroid progeny of edited adult CD34+ cells, the cells were differentiated into erythroid cells by culture for 18 days in the presence of human cytokines (erythropoietin, SCF, IL3), human plasma (Octoplas), and other supplements (hydrocortisone, heparin, transferrin, insulin). At day 18, the relative expression levels of gamma-globin chains over total beta-like globin chains (gamma chains/[gamma chains+beta chain]) was measured by UPLC. Up to 39.1% of gamma-globin was detected after co-delivery of ssODN instead of 29% when using OLI8394-RNP alone (FIGS. 20A-B).

[0450] The effect of the dose of ssODN was evaluated using ssODN OLI16424. mPB CD34+ cells were pre-stimulated for 2 days with human cytokines in X-Vivo-10 and then electroporated with a mixture composed of OLI16424-ssODN at doses ranging from 0.625 μM to 10 μM and OLI8394-RNP at 2 μM. After three days post electroporation the genomic DNA was extracted, and next-generation sequencing was performed on the HBG PCR products. Increasing the dose of ssODN up to 5 μM resulted in increased gene correction and reduced frequency of 4.9 kb deletions between HBG1 and HBG2 (as measured by ddPCR), while maintaining overall editing level and without affecting cell viability (FIGS. 21A-C). The level of gamma-globin increased up to 39.5% of total beta-like chains at the 5 μM dose of ssODN (FIG. 21D), as measured by UPLC analysis of the cell lysates after 18 days of erythroid culture.

[0451] The co-delivery of the OLI8394-RNP and the OLI16424 ssODN was further optimized by varying the relative dose of ssODN and RNP. mPB CD34+ cells were pre-stimulated for 2 days with human cytokines in X-Vivo-10 and then electroporated with a mixture composed of OLI16424-ssODN at doses ranging from 1.25 μM to 5 μM and OLI8394-RNP at 2 μM to 8 μM. After three days post electroporation the genomic DNA was extracted, and next-generation sequencing was performed on the HBG PCR products. An improved gene editing outcome, i.e., a lower frequency of 4.9 kb deletions between the HBG1 and HBG2 genes and a higher level of gene correction, was achieved with a lower RNP dose combined with a higher ssODN dose (FIG. 22A-C). This resulted in the highest level of gamma-globin expression after erythroid differentiation (FIG. 22D).

### Example 10: Gene Correction in Human Hematopoietic Stem/Progenitor Cells can be Achieved with Short ssODN Templates with Symmetrical and Asymmetrical Homology Arms

[0452] To determine whether gene correction could be achieved using templates shorter than the previously tested 180 nt lengths used in Example 9, ssODNs encoding the “4 nt” deletion (HBGΔ-112:-115) were designed and synthesized with shorter homology arms either symmetrical or asymmetrical relative to the deleted sequence (OLI16419-OLI16423, and OLI16425-OLI16429, Table 11, FIG. 23A). Briefly, mPB CD34+ cells were pre-stimulated for 2 days with human cytokines in X-Vivo-10 and then electroporated with a mixture composed of an ssODN donor (OLI16424, OLI16419 or OLI16421) at 2.5 μM and Cas9 protein precomplexed to OLI8394 (OLI8394-RNP) at 2 μM. After three days post electroporation the genomic DNA was extracted, and next-generation sequencing was performed on the HBG PCR products. Total editing and gene correction level were similar across ssODNs having symmetrical 90 nt homology arms, symmetrical 50 nt homology arms or 40/80 asymmetrical arms (FIG. 23B).

### Example 11: Co-Delivery of ssODN Donors with Paired D10A-Cas9 RNPs to Adult CD34+ Cells Supports Gene Correction at the HBG Distal CCAAT Box

[0453] To determine if ssODN-mediated gene correction to introduce CCAAT box disrupting deletions (such as, the “4 nt” deletion) in mPB CD34+ cells could be supported by D10A nickase pairs, CD34+ cells were electroporated with D10A Cas9 RNPs targeting HBG, with or without ssODN (OLI16424) (Table 11). Briefly, Sp37 and SpA gRNA were chemically synthesized (OLI7075 and OLI7074, respectively, Table 12) and complexed with D10A-Cas9 nickase mutant protein. Human adult mPB CD34+ cells were pre-stimulated for 48h in medium supplemented with human cytokines. Next, the D10A-Cas9 RNP pair comprising Sp37+SpA (2 μM+2 μM) was delivered to the CD34+ cells, alone or in combination with OLI16424, and genomic DNA was extracted 3 days post-electroporation for Illumina sequencing analysis.

TABLE 12
gRNA sequences for targeting the CCAAT
box in CD34+ cells with D10A Cas9

| gRNA | | gRNA sequence | gRNA sequence |
|---|---|---|---|
| ID | OLI-ID | (RNA) | (DNA) |
| Sp37 | OLI17075 | CUUGACCAAUAGCCU | CTTGACCAATAGCCT |
| | | UGACAGUUUUAGAGC | TGACAGTTTTAGAGC |
| | | UAGAAAUAGCAAGUU | TAGAAATAGCAAGTT |
| | | AAAAUAAGGCUAGUC | AAAATAAGGCTAGTC |
| | | CGUUAUCAACUUGAA | CGTTATCAACTTGAA |
| | | AAAGUGGCACCGAGU | AAAGTGGCACCGAGT |
| | | CGGUGCUUUU | CGGTGCTTTT |
| | | (SEQ ID NO: 996) | (SEQ ID NO: 998) |
| SpA | OLI17074 | GGCAAGGCUGGCCAA | GGCAAGGCTGGCCAA |
| | | CCCAUGUUUUAGAGC | CCCATGTTTTAGAGC |
| | | UAGAAAUAGCAAGUU | TAGAAATAGCAAGTT |
| | | AAAAUAAGGCUAGUC | AAAATAAGGCTAGTC |
| | | CGUUAUCAACUUGAA | CGTTATCAACTTGAA |
| | | AAAGUGGCACCGAGU | AAAGTGGCACCGAGT |
| | | CGGUGCUUUU | CGGTGCTTTT |
| | | (SEQ ID NO: 997) | (SEQ ID NO: 999) |

[0454] Co-delivery of the ssODN supported ˜65% indels, instead of ˜51% when the D10A-Cas9 RNP pair was delivered alone, as determined by sequencing of the HBG PCR product from genomic DNA (FIG. 24). Detailed sequencing analysis also demonstrated that 16% of the alleles carried the precise 4 nt deletion (HBG:Δ-112:-115) when the OLI16424 ssODN donor was co-delivered, whereas this deletion was undetected when the RNP pair was delivered alone. This indicated that ˜25% of indels occurred by precise gene correction in the presence of the ssODN.

### Example 12: Cpf1 RNP Containing gRNA Targeting the CCAAT Box Supports Gene Editing in Human Hematopoietic Stem/Progenitor Cells

[0455] A Cpf1 guide RNA, HBG1-1 (i.e., OLI13620 (Table 13)), was designed to target the CCAAT box. To determine optimal nuclear localization signal configuration for Acidaminococcus sp. Cpf1 (“AsCpf1”) delivery in CD34+ cells, HBG1-1 gRNA was complexed to two nuclear localization signal (NLS) variants of AsCpf1, namely His-AsCpf1-nNLS (SEQ ID NO: 1000) and His-AsCpf1-sNLS-sNLS (SEQ ID NO:1001). “His” refers to a six-histidine purification sequence, “AsCpf1” refers to the Acidaminococcus sp. Cpf1 protein sequence, “nNLS” refers to the nucleoplasmin NLS, and “sNLS” refers to the SV40 NLS.

[0456] Briefly, mPB CD34+ cells were pre-stimulated for 2 days with human cytokines in X-Vivo-10 and then electroporated with the RNPs at 5 μM or 20 μM. The genomic DNA was extracted three days post electroporation and next-generation sequencing was performed on the HBG PCR products. HBG1-1 gRNA complexed to either of the Cpf1 NLS variants tested (“His-AsCpf1-sNLS-sNLS_HBG1-1 RNP” or “His-AsCpf1-nNLS_HBG1-1 RNP”), supported editing of CD34+ cells at the 13 nt target site. His-AsCpf1-sNLS-sNLS_HBG1-1 RNP generated 60.6% edited alleles and His-AsCpf1-nNLS_HBG1-1 RNP generated 51.1% edited alleles at the highest dose tested (FIG. 25A).

TABLE 13
HBG1-1 gRNA sequence for targeting the CCAAT box in CD34⁺ cells

| | | | | Targeting | Targeting | |
|---|---|---|---|---|---|---|
| | | Targeting | Targeting | domain | domain | |
| | | domain | domain | sequence plus | sequence plus | |
| gRNA | | sequence | sequence | PAM (UUUG) | PAM (TTTG) | |
| ID | OLI-ID | (RNA) | (DNA) | (RNA) | (DNA) | Sense |
| HBG1-1 | OLI13620 | CCUUGUC | CCTTGTC | UUUGCCUUGU | TTTGCCTTG | Antisense |
| | | AAGGCUA | AAGGCTA | CAAGGCUAUU | TCAAGGCT | |
| | | UUGGUC | TTGGTC | GGUC (SEQ ID | ATTGGTC | |
| | | (SEQ ID | (SEQ ID | NO: 1004) | (SEQ ID | |
| | | NO: 1002) | NO: 1003) | | NO: 1005) | |

### Example 13: Co-Delivery of Cpf1 RNP Targeting the CCAAT Box with ssODN Donors Supports Gene Editing in Human Hematopoietic Stem/Progenitor Cells

[0457] RNP comprising HBG1-1 gRNA complexed to the His-AsCpf1-sNLS-sNLS variant (“His-AsCpf1-sNLS-sNLS_HBG1-1 RNP”) were co-delivered by electroporation with single stranded oligodeoxynucleotide donor repair templates (ssODNs) to mPB CD34+ cells. As discussed in the examples above, OLI16430 and OLI16424 ssODNs were designed to “encode” a 4 nucleotide deletion and OLI16409 and OLI16410 ssODNs were designed to “encode” a 18 nucleotide deletion (Table 11). Both the 4 nt and 18 nt deletions disrupt the HBG distal CCAAT box and are associated with induction of HBG expression. The ssODNs include 90 nucleotide-long homology arms flanking the encoded absent sequence to create perfect deletion. The ssODNs were modified to contain phosphorothioates (PhTx) at the 5′ and 3′ ends (OLI16430, OLI16424, OLI16409, and OLI16410, Table 11). Briefly, human adult mPB CD34+ cells pre-stimulated for two days in medium supplemented with human cytokines were electroporated with 5 μM RNP comprising the His-AsCpf1-sNLS-sNLS protein complexed to HBG1-1 gRNA (“His-AsCpf1-sNLS-sNLS_HBG1-1 RNP”) either alone, or in combination with 2.5 μM of one of the ssODN donors (OLI16430, OLI164324, OLI16409, or OLI16410). Co-delivery of the RNP and ssODN donor encoding the 18 nt deletion with positive strand homology arms (OLI16409) enhanced the editing frequency from 39.5% without donor to 73.3%, as determined by sequencing analysis of the HBG PCR product from genomic DNA extracted at 72 hours post-electroporation (FIG. 26A).

[0458] Further analysis of the specific type and size of deletions at the target site revealed that in the presence of the 18 nt positive strand donor (OLI16409), 57.3% of alleles carried the 18 nt deletion compared to 7.5% of alleles when the His-AsCpf1-sNLS-sNLS_HBG1-1 RNP was delivered alone (FIG. 26B). The ssODN co-delivery mediated precise repair of the DNA DSB because the 18 nt deletion represented 71.2% of all the indels generated with co-delivery of ssODN OLI16409 and His-AsCpf1-sNLS-sNLS_HBG1-1 RNP, whereas the 18 nt deletion represented only 19.0% of all the indels were generated when delivering His-AsCpf1-sNLS-sNLS_HBG1-1 RNP alone (FIG. 26C).

[0459] Although the data in FIGS. 26A-26C originally suggested that codelivery of Cpf1 RNP with ssODN donors increased precise gene editing of genomic DNA resulting in the 18 nt deletion, subsequent testing repeating the experiment in Example 13 confirmed that these data were an artifact of the experiment. Nonetheless, data acquired from the subsequent repeated experiments testing the AsCpf1 RNP using the guide RNA HBG1-1 and ssODN OLI16409 indicated that codelivery of an ssODN donor supports increased total editing in human mPB-CD34+ cells, although not associated with precise repair of the DNA DSB toward the “−18 nt deletion” (see Example 21).

### Example 14: Cpf1 RNP Containing gRNA Targeting the Distal CCAAT Box Region of the HBG Promoter Supports Gene Editing in Human Hematopoietic Stem/Progenitor Cells which Promotes Induction of HbF Protein Expression in the Erythroid Progeny

[0460] Guide RNA HBG1-1 (Table 14) having a targeting domain comprising SEQ ID NO:1002 (Table 15), targets a site within the HBG promoter (FIG. 27A). The HBG1-1 gRNA (SEQ ID NO:1022) was complexed to wild-type AsCpf1 (AsCpf1-sNLS-sNLS, SEQ ID NO:1001) to form an RNP (“AsCpf1-HBG1-1-RNP”, Table 14). This complex (5 μM or 20 μM) was then electroporated into mobilized peripheral blood (mPB) derived CD34+ cells using either the Amaxa nucleofector (Lonza), or the MaxCyte GT (MaxCyte, Inc.) electroporation device. The level of insertions/deletions at the target site was analyzed by Illumina sequencing (NGS) of the PCR amplified target site three days after electroporation. AsCpf1-HBG1-1-RNP supported on-target editing of 43% and 17%, respectively, on the Amaxa and MaxCyte electroporation systems (FIGS. 28A (Amaxa) and 28B (MaxCyte)). Following the editing of mPB CD34+ cells, ex vivo differentiation into the erythroid linage was performed for 18 days (Giarratana 2011). Then, relative expression levels of gamma-globin chains (over total beta-like globin chains) was measured by UPLC (FIGS. 28A (Amaxa) and 28B (MaxCyte)). AsCpf1-HBG1-1-RNP led to an increase of gamma-globin expression by up to 21% above levels detected in cells derived from mock electroporated mPB CD34+ cells (FIG. 28A).

TABLE 14
RNP components

| | Protein | RNP | | gRNA | gRNA sequence |
|---|---|---|---|---|---|
| gRNA ID | variant | components | RNP ID | modification | (RNA) |
| HBG1-1 | AsCpf1- | gRNA | HBG1-1- | Synthetic | UAAUUUCUACUC |
| gRNA | sNLS-sNLS | + | AsCpf1-RNP | unmodified | UUGUAGAUCCUU |
| | (SEQ ID | AsCpf1 WT | | | GUCAAGGCUAUU |
| | NO: 1001) | | | | GGUC (SEQ ID |
| | | | | | NO: 1022) |
| HBG1-1 | His-AsCpf1- | gRNA | HBG1-1- | Synthetic | UAAUUUCUACUC |
| gRNA | sNLS-sNLS | + | AsCpf1H800 | unmodified | UUGUAGAUCCUU |
| | H800A | AsCpf1 | A-RNP | | GUCAAGGCUAUU |
| | (SEQ ID | H800A | | | GGUC (SEQ ID |
| | NO: 1032) | | | | NO: 1022) |
| HBG1-1 | His-AsCpf1- | gRNA | HBG1-1- | 5′OMe- | UAAUUUCUACUC |
| gRNA | sNLS-sNLS | + | AsCpf1H800 | PS2OMe | UUGUAGAUCCUU |
| | H800A | AsCpf1 | A-RNP | | GUCAAGGCUAUU |
| | (SEQ ID | H800A | | | GGmU/PS2/mC |
| | NO: 1032) | | | | (SEQ ID NO: 1041) |
| tSpA | SpCas9WT | dead gRNA | tSpA-Cas9- | Synthetic 5′- | mG*mG*mC*UGG |
| dead gRNA | (SEQ ID | + | RNP | 3′ 3xPSOMe | CCAACCCAUGU |
| | NO: 1033) | SpCas9 WT | | | UUUAGAGCUAG |
| | | | | | AAAUAGCAAGU |
| | | | | | UAAAAUAAGGC |
| | | | | | UAGUCCGUUAU |
| | | | | | CAACUUGAAAA |
| | | | | | AGUGGCACCGA |
| | | | | | GUCGGUGCmU* |
| | | | | | mU*mU*U |
| | | | | | (SEQ ID NO: 1024) |
| SpA | His-NLS- | gRNA | SpA-D10A- | Synthetic 5′- | mG*mG*mC*AAG |
| gRNA | SpCas9D10A | + | RNP | 3′ 3xPSOMe | GCUGGCCAACC |
| | (SEQ ID | SpCas9 | | | CAUGUUUUAGA |
| | NO: 1034) | nickase | | | GCUAGAAAUAG |
| | | | | | CAAGUUAAAAU |
| | | | | | AAGGCUAGUCC |
| | | | | | GUUAUCAACUU |
| | | | | | GAAAAAGUGGC |
| | | | | | ACCGAGUCGGU |
| | | | | | GCmU*mU*mU*U |
| | | | | | (SEQ ID NO: 1025) |
| SpG | His-NLS- | gRNA | SpG-D10A- | Synthetic 5′- | mU*mA*mG*UCU |
| gRNA | SpCas9D10A | + | RNP | 3′ 3xPSOMe | UAGAGUAUCCA |
| | (SEQ ID | SpCas9 | | | GUGGUUUUAGA |
| | NO: 1034) | nickase | | | GCUAGAAAUAG |
| | | | | | CAAGUUAAAAU |
| | | | | | AAGGCUAGUCC |
| | | | | | GUUAUCAACUU |
| | | | | | GAAAAAGUGGC |
| | | | | | ACCGAGUCGGU |
| | | | | | GCmU*mU*mU*U |
| | | | | | (SEQ ID NO: 1026) |
| Sp182 | SpCas9WT | dead gRNA | Sp182-Cas9- | Synthetic 5′- | mU*mU*mA*GAG |
| dead gRNA | (SEQ ID | + | RNP | 3′ 3xPSOMe | UAUCCAGUGGU |
| | NO: 1033) | SpCas9 WT | | | UUUAGAGCUAG |
| | | | | | AAAUAGCAAGU |
| | | | | | UAAAAUAAGGC |
| | | | | | UAGUCCGUUAU |
| | | | | | CAACUUGAAAA |
| | | | | | AGUGGCACCGA |
| | | | | | GUCGGUGCmU* |
| | | | | | mU*mU*U |
| | | | | | (SEQ ID NO: 1027) |

“His” refers to a six-histidine purification sequence
“AsCpf1” refers to the Acidaminococcus sp. Cpf1 protein sequence
“nNLS” refers to the nucleoplasmin NLS, and “sNLS” refers to the SV40 NLS
“SpCas9” refers to the S. Pyogenes Cas9 protein sequence
“*”represents phosphorothioate modification
“PS” represents phosphorothioate modification
“PS2” represents phosphorodithioate modification
“OMe” represents a 2-o-methyl modification
“m” represents a 2-o-methyl modification

TABLE 15
Cpf1 guide RNA targeting sequences

| | gRNA Targeting domain | gRNA Targeting domain |
|---|---|---|
| gRNA ID | sequence (RNA) | sequence (DNA) |
| HBG1-1 | CCUUGUCAAGGCUAUUGGUC | CCTTGTCAAGGCTATTGGTC (SEQ ID |
| gRNA | (SEQ ID NO: 1002) | NO: 1003) |
| Sp182 | UUAGAGUAUCCAGUG | TTAGAGTATCCAGTG |
| dgRNA | (SEQ ID NO: 1028) | (SEQ ID NO: 1029) |
| SpG | UAGUCUUAGAGUAUCCAGUG | TAGTCTTAGAGTATCCAGTG (SEQ ID |
| gRNA | (SEQ ID NO: 359) | NO: 1030) |
| SpA | GGCAAGGCUGGCCAACCCAU | GGCAAGGCTGGCCAACCCAT |
| gRNA | (SEQ ID NO: 941) | (SEQ ID NO: 944) |
| tSpA | GGCUGGCCAACCCAU | GGCTGGCCAACCCAT |
| dgRNA | (SEQ ID NO: 326) | (SEQ ID NO: 1031) |

### Example 15: Cpf1 RNP Editing Efficiency at the CCAAT Box Region of the HBG Promoter is Enhanced when Co-Delivered with S. Pyogenes Cas9 RNP with No Impact on Viability

[0461] It was hypothesized that the co-delivery of Cpf1-RNP with proximally targeting S. Pyogenes Cas9 RNP, either catalytically inactive or introducing single nicks, could enhance editing levels at the target site. In an attempt to enhance Cpf1-RNP mediated editing at the distal CCAAT box region of the HBG promoter, HBG1-1-AsCpf1H800A-RNP (composed of His-AsCpf1-sNLS-sNLS-H800A (SEQ ID NO:1032) complexed to HBG1-1 gRNA with a 3′ modification as shown in Table 14 (SEQ ID NO:1041) was co-delivered into mPB CD34+ cells with: (1) S. Pyogenes Cas9 D10A RNP containing a Cas9 D10A protein (His-NLS-SpCas9D10A, SEQ ID NO:1034) complexed to a full length guide RNA (100mer) selected from: (α) SpA gRNA (Tables 14, 15; FIG. 27B) (“SpA-D10A-RNP”, Table 14) or (b) SpG gRNA (Tables 14, 15; FIG. 27C) (“SpG-D10A-RNP”, Table 14)); (2) S. Pyogenes WT Cas9 RNP containing a WT Cas9 protein (SpCas9WT, SEQ ID NO:1033) complexed to a truncated dead guide RNA (95mer -with a shortened protospacer region) selected from (a) tSpA dgRNA (Tables 14, 15; FIG. 27E) (“tSpA-Cas9-RNP”, Table 14); (b) Sp182 dgRNA (Tables 14, 15; FIG. 27F) (“Sp182-Cas9-RNP”, Table 14); or (c) tSpA-Cas9-RNP and Sp182-Cas9-RNP (Tables 14, 15, FIG. 27D). The RNP complexes were electroporated using the MaxCyte GT device (MaxCyte, Inc). The level of insertions/deletions at the target site was then analyzed by Illumina sequencing (NGS) of the PCR amplified target site three days after electroporation. In all combinations tested, irrespective of the S. Pyogenes Cas9 enzyme used (D10A or WT) and of PAM orientation, total editing was increased above levels observed following Maxcyte delivery of HBG1-1-AsCpf1H800A-RNP alone (FIG. 29 and Table 16). In addition there was no detrimental effect on viability of mPB CD34+ cells when S. Pyogenes Cas9 RNP were co-delivered (FIG. 30).

TABLE 16
Summary of indels and gamma globin expression with
each RNP combination at the maximum RNP dose tested

| | | | | Gamma Globin |
|---|---|---|---|---|
| | | | Indels | (over total beta- |
| Cpf1 RNP | Cas9 RNP1 | Cas9 RNP2 | (NGS) | like chains) |
| — | — | — | 0% | 13.5% |
| HBG1-1- | — | — | 8.0% | 20.0% |
| AsCpf1H800A- | | | | |
| RNP | | | | |
| HBG1-1- | SpG-D10A- | — | 88.6% | 30.2% |
| AsCpf1H800A- | RNP | | | |
| RNP | | | | |
| HBG1-1- | SpA-D10A- | — | 42.6% | 32.5% |
| AsCpf1H800A- | RNP | | | |
| RNP | | | | |
| HBG1-1- | tSpA-Cas9- | — | 32.2% | 19.8% |
| AsCpf1H800A- | RNP | | | |
| RNP | | | | |
| HBG1-1- | Sp182-Cas9- | — | 85.4% | 42.8% |
| AsCpf1H800A- | RNP | | | |
| RNP | | | | |
| HBG1-1- | tSpA-Cas9- | Sp182-Cas9- | 80.1% | 33.7% |
| AsCpf1H800A- | RNP | RNP | | |
| RNP | | | | |

### Example 16: Cpf1 Editing Profile can be Manipulated with Co-Delivery of S. Pyogenes Cas9-D10A-RNP

[0462] In addition to the increase in total editing observed when HBG1-1-AsCpf1H800A-RNP was co-delivered to mPB CD34+ cells with S. Pyogenes Cas9-D10A-RNP (FIG. 29), changes to the indel profile were also observed. The introduction of a single strand break proximal to the Cpf1-RNP target site by the D10A enzyme (FIG. 31A) altered the directionality, length and/or position of the indels (FIG. 31B). For example, Sp182-D10A-RNP strongly shifted the profile toward the nicking site introduced by the D10A RNP, with deletions of various length extending from the Cpf1 cut site toward the upstream nicking site (Sp182-D10A-RNP, FIG. 31B). While the SpA-D10A-RNP also promoted the generation of deletions extending from the HBG1-1-AsCpf1H800A-RNP cut site to the nicking site introduced by the D10A enzyme (here located downstream), in this case, additional deletions apparently originating from the nicking site, but not extending fully to the HBG1-1-AsCpf1H800A-RNP cut site, were also produced (SpA-D10A-RNP, FIG. 31B).

[0463] It is probable that the orientation, target strand, and distance of the S. Pyogenes Cas9-D10A-RNP target site to the Cpf1-RNP target site leads to differences in the position and length of the mutations promoted by the additional DNA nick (FIG. 31A). It should be noted that in certain applications this directional manipulation of the indel profile, i.e., an increase in the frequency of indels occurring between the Cpf1-RNP and S. Pyogenes Cas9 D10A-RNP binding sites, could be used to favor a desired editing outcome, to increase the rate of productive indels (e.g., indels disrupting a targeted site). In the case set-out within, to disrupt the dCCAAT target region and induce HbF protein expression, the co-delivery of HBG1-1-AsCpf1H800A-RNP with S. Pyogenes D10A-RNP led to an increase of gamma globin levels by 16.7% (SpG-D10A-RNP) or 19.0% (SpA-D10A-RNP) above levels detected in mock electroporated cells, as detected by UPLC analysis after 18 days of erythroid differentiation post electroporation (FIG. 29 and Table. 16). The frequency of productive indels was higher when pairing HBG1-1-AsCpf1H800A-RNP with SpA-D10A-RNP (versus SpG-D10A-RNP) as a higher increase in HbF levels (19% with Cas9D10Δ-SpA-RNP vs 16.7% with SpG-D10A-RNP) was achieved from a lower editing level (42.6% with SpA-D10A-RNP vs 88.6% with SpG-D10A-RNP) (FIG. 29 and Table 16).

### Example 17: Cpf1 Editing is Increased without Altering the Editing Profile in the Presence of S. Pyogenes Cas9 WT RNP Containing a Dead Guide RNA

[0464] When co-delivering HBG1-1-AsCpf1H800A-RNP (at a fixed dose of 6 μM) to mPB CD34+ cells with increasing doses of Sp182-Cas9-RNP (complexed with a truncated, 95mer dead gRNA, Sp182), using the MaxCyte electroporator device, an editing boost has been observed up to greater than 10-fold (85.4% editing with the highest dose of Sp182-Cas9-RNP versus 8.0% when HBG1-1-AsCpf1H800A-RNP was delivered alone) (FIG. 29). The levels of editing achieved here by co-delivering Sp182-Cas9-RNP also greatly surpassed the levels of editing obtained using the MaxCyte electroporator device when HBG1-1-AsCpf1H800A-RNP was delivered alone at doses as high as 20 uM (FIG. 28B). In contrast to the results observed by co-delivering a D10A-RNP (in Example 16), the increase in editing achieved by co-delivering HBG1-1-AsCpf1H800A-RNP with Sp182-Cas9-RNP (Cas9-WT complexed with a truncated gRNA) was not associated with an apparent impact on the indel profile. The indels detected in electroporated cells were centered around the Cpf1 cut site in an approximal symmetrical fashion and no indels were detected at the Sp182-Cas9-RNP target site (FIG. 32A). Of note, 96% of the total indels were disrupting the distal-CCAAT box, and 79.5% of total indels disrupted 3 or more nucleotides of the CCAAT box motif (FIG. 32B). Further dosing optimization using HBG1-1-AsCpf1H800A-RNP (composed of His-AsCpf1-sNLS-sNLS-H800A (SEQ ID NO:1032) complexed to HBG1-1 gRNA (SEQ ID NO:1022)) and Sp182-Cas9-RNP enabled editing levels of up to 92% in mPB-CD34+ cells at 120 hours post-electroporation using the MaxCyte device, and lead to gamma chain expression levels 32% above background in erythroid derived cells (41% of gamma chains in treated cells, 8% in mock treated cells) (FIG. 33). Those results demonstrate that an RNP composed of WT S. Pyogenes Cas9 protein complexed with a truncated gRNA can increase the editing from a proximally binding Cpf1-RNP without introducing detectable levels of editing at its own binding site nor noticeably affecting the length nor directionality of indels generated by the Cpf1-RNP. Here, the editing enhancement provided by the Sp182-Cas9-RNP enables high editing of the HBG1-1-AsCpf1H800A-RNP at the HBG promoter, with a high frequency of indels disrupting the distal CCAAT box target motif and leading to therapeutically relevant levels of gamma chain expression in the bulk erythroid progeny of the electroporated cells.

### Example 18: Clonal HbF Distribution within Cell Population Edited with Cpf1 gRNA Targeting the Distal CCAAT Box

[0465] A single cell experiment was next performed to evaluate the distribution of gamma chain expression levels in erythroid cells derived from mPB CD34+ cells electroporated with the HBG1-1-AsCpf1H800A-RNP (composed of His-AsCpf1-sNLS-sNLS-H800A (SEQ ID NO:1032) complexed to HBG1-1 gRNA with a 3′ modification as shown in Table 14 (SEQ ID NO:1041))+Sp182-Cas9-RNP combination (FIG. 27F, Table 14). After being left to recover during 48 hours post-electroporation, the cells were sorted by Fluorescence Activated Cell Sorting (FACS) at 1-cell/well in non-tissue culture treated 384-well plates. The cells were then differentiated and expanded clonally for 18 days into the erythroid lineage (adapted from Giarratana 2011). UPLC analysis was performed to determine the distribution of gamma chain expression levels (percentage of gamma chains/[total beta-like chains]) in the clonal erythroid progeny of cells derived from the total population of mPB-CD34+ cells initially edited. It is considered that in order to achieve a functional benefit and alleviate symptoms associated with sickle cell disease, ˜30% of the erythroid cells should have fetal hemoglobin levels greater than 30%. Of the clones analyzed, 83.1% had gamma chains levels above the median level detected in erythroid clones derived from mock electroporated mPB CD34+ cells (median value=18.8%), 64.2% had gamma chains levels exceeding 30% of total beta-like and 35.8% had gamma chains levels exceeding 48.8% of total beta-like (30%+18.8% median level in control cells) (FIG. 34).

### Example 19: Screen of Cpf1 gRNAs Targeting the HBG Promoter Region

[0466] To identify other AsCpf1 gRNA that could be used as a component of a single RNP or in combination with a “booster element” to increase editing of the HBG promoter region in CD34⁺ cells and induce fetal globin expression in the erythroid progeny of modified cells, His-AsCpf1-NLS-NLS (“AsCpf1,” SEQ ID NO:1000); AsCpf1 S542R/K607R (“AsCpf1 RR,” SEQ ID NO:1036); or AsCpf1 S542R/K548V/N552R (“AsCpf1 RVR,” SEQ ID NO:1037) gRNA sequences targeting several domains of the HBG promoter (Table 17) were designed (listed in Table 18). AsCpf1 RR and AsCpf1 RVR are engineered AsCpf1 variants which recognize TYCV/ACCC/CCCC and TATV/RATR PAMs, respectively (Gao 2017).

TABLE 17
Subdomains of the HBG genomic region

| Genomic | | |
|---|---|---|
| Coordinate of | | |
| HbG* | Nucleotides | Name of Region |
| Chr 11 | TCCTAAAGCT TGGAACACTT | Region 1: Downstream of HBG1 |
| (NC_000011.10): | TCCCTTCCTT AAGAACCATC | |
| 5,247,883- | CTTGCTACTC AGCTGCAATC | |
| 5,248,186 | AATCCAGCCC CCAGGTCTTC | |
| | ACTGAACCTT TTCCCATCTC | |
| | TTCCAAAACA TCTGTTTCTG | |
| | AGAAGTCCTG TCCTATAGAG | |
| | GTCTTTCTTC CCACCGGATT | |
| | TCTCCTACAC CATTTACTCC | |
| | CACTTGCAGA ACTCCCGTGT | |
| | ACAAGTGTCT TTACTGCTTT | |
| | TATTTGCTCA TCAAAATGCA | |
| | CATCTCATAT AAAAATAAAT | |
| | GAGGAGCATG CACACACCAC | |
| | AAACACAAAC AGGCATGCAG AAAT | |
| | (SEQ ID NO: 1118) | |
| Chr 11 | ATAAAGATGA ACCCATAGTG | Region 2: HBG1 Intron 2-A |
| (NC_000011.10): | AGCTGAGAGC TCCAGCCTGG | |
| 5,248,509- | CCTCCAGATA ACTACACACC | |
| 5,249,173 | AAGCTTCCAC CCAGAATCAA | |
| | GCCTATGTTA ACTTCCCTCA | |
| | AAGCCTGAGA TTTTGCCTTC | |
| | CCATTAAATG CAGGTAGTTG | |
| | TTCCCCTTCA AGCACTAGTC | |
| | ACTGGCCATA ATTTAAATCT | |
| | TGCTATCTTC TTGCCACCAT | |
| | GAACCCTGTA TGTTGTAGGC | |
| | TGAAGACGTT AAAAGAAACA | |
| | CACGCTGACA CACACACACA | |
| | CACGCGCGCG CGCACACACA | |
| | CACACACACA CAGAGCTGAC | |
| | TTTCAAAATC TACTCCAGCC | |
| | CAAATGTTTC AATTGTTCCT | |
| | CACCCCTGGA CATACTTTGC | |
| | CCCCATCTGG AATTAAAGGA | |
| | TATAAGTTTG TAATGAAGCA | |
| | TTAGCAGCAT TTTATATGTG | |
| | TCCAGCTGAT ATAGGAATAG | |
| | CCTTAGCAAT GTATGTTTGG | |
| | CCACCAAAGT TCCCCACTTT | |
| | GACTGAGCCA ATATATGCCT | |
| | TCTGCCTGCA TCTTTTTAAC | |
| | GACCATACTT GTCCTGCCTC | |
| | CAGATAGATG TTTTAAAACA | |
| | ACAAAAATGA GGGAAAGATG | |
| | AAAGTTCTTT CTACTGGAAT | |
| | CTAATAAAGA AAAGTCATTT | |
| | TCCTCATTTC CACCTCTCTT | |
| | TTCTCAAAGT CAAAATTGTC CATCT | |
| | (SEQ ID NO: 1119) | |
| Chr 11 | CCCTAAAACA TTACCACTGG | Region 3: HBG1 Intron 2-B |
| (NC_000011.10): | GTCTCAGCCC AGTTAGTCCT | |
| 5,249,198- | CTGCAGTTTC TTCACCCCCA | |
| 5,249,362 | ACCCCAGTAT CTTCAAACAG | |
| | CTCACACCCT GCTGTGCTCA | |
| | GATCAATACT CCGTTGTCTA | |
| | AGTTGCCTCG AGACTAAAGG | |
| | CAACAGGGCT GAAACATCTC CTGGA | |
| | (SEQ ID NO: 1120) | |
| Chr 11 | CTGTGAGATT GACAAGAACA | Region 4: HBG1 Intron 1 |
| (NC_000011.10): | GTTTGACAGT CAGAAGGTGC | |
| 5,249,591- | CACAAATCCT GAGAAGCGAC | |
| 5,249,712 | CTGGACTTTT GCCAGGCACA | |
| | GGGTCCTTCC TTCCCTCCCT | |
| | TGTCCTGGTC ACCAGAGCCT AC | |
| | (SEQ ID NO: 1121) | |
| Chr 11 | GCCGCCGGCC CCTGGCCTCA CTGG | Region 5: HBG1 −60 nt region |
| (NC_000011.10): | (SEQ ID NO: 1122) | from Transcription Start Site |
| 5,249,904- | | (TSS) |
| 5,249,927 | | |
| Chr 11 | CCTTGTCAAG GCTATTGGTC | Region 6: HBG1 −110 nt region |
| (NC_000011.10): | AAGGCAAGGC TGG (SEQ ID | from TSS |
| 5,249,955- | NO: 1123) | |
| 5,249,987 | | |
| Chr 11 | TGAGATAGTG TGGGGAAGGG | Region 7: HBG1 −200 nt region |
| (NC_000011.10): | GCCCCC AAGAGGATAC (SEQ ID | from TSS |
| 5,250,040- | NO: 1124) | |
| 5,250,075 | | |
| Chr 11 | TATAGCCTTT GCCTTGTTCC | Region 8: HBG1 −250 nt region |
| (NC_000011.10): | GATTCAGTCA TTCCAGTTTT T (SEQ | from TSS |
| 5,250,089- | ID NO: 1125) | |
| 5,250,129 | | |
| Chr 11 | TCTTCCCTTT AGCTAGTTTC | Region 9: HBG1 −333 nt region |
| (NC_000011.10): | CTTCTCCCAT CATAGAGGAT | from TSS |
| 5,250,141- | ACCAGGACTT CTTTTGTCAG | |
| 5,250,254 | CCGTTTTTTA CCTTCTTGTC | |
| | TCTAGCTCCA GTGAGGCCTG | |
| | TAGTTTAAAG CTAA (SEQ ID | |
| | NO: 1126) | |
| Chr 11 | CCACAGTTTC AGCGCAGTAA | Region 10: HBG1 −650 nt region |
| (NC_000011.10): | TAGATTAGTG TTACATAATA | from TSS |
| 5,250,464- | TAAGACCTAA TGCTTACCTC | |
| 5,250,549 | AATATCTACT TATCCGTACC TATTTG | |
| | (SEQ ID NO: 1127) | |
| Chr 11 | TATTCAGGTA TGTATGTATA | Region 11: HBG1 −800 nt region |
| (NC_000011.10): | CACCAGATGA TGTGTATTTA | from TSS |
| 5,250,594- | CCACTGGATA AGTGTGTGTG | |
| 5,250,735 | CTGGCTGATG ACCCAGGGTT | |
| | TTGGCGTAGC TCTTCTATGC | |
| | TCAGTAAAGA TGATGGTAGA | |
| | ATGTTCTTTG GCAGGTACTG TG (SEQ | |
| | ID NO: 1128) | |
| Chr 11 | CAATAAAGAT GAACCCATAG | Region 12: HBG2 Intron 2-A |
| (NC_000011.10): | TGAGCTGAGA GCTCCAGCCT | |
| 5,253,425- | GGCCTCCAGA TAACTACACA | |
| 5,254,121 | CCAAGCTTCC ACCCAGAATC | |
| | AAGCCTATGT TAACTTCCCT | |
| | CAAAGCCTGA GATTTTGCTT | |
| | TCCCATTAAA TGCAGGTAGT | |
| | TGTTCTTCTT GCAGCACTAG | |
| | TCACTGGCCA TAATTTAAAT | |
| | CTTGTTATCT TCTTGCCACC | |
| | ATGAACCCTG TATGCTGTAG | |
| | GCTGAAAACG TTAAAAGAAA | |
| | CACACGCTCT CACACACACA | |
| | CAAACACACG CGCGCACACA | |
| | CACACACACA CACACAGAGC | |
| | TGACTTTCAA AATCTACTCC | |
| | AGCCCAAATG TTTCAATTGT | |
| | TCCTCACCCC TGGACATACT | |
| | TTGCCCCCAT CTGGAATTAA | |
| | AGGATATAAG TTTGTAATGA | |
| | AGCATTAGCA GCATTTTATA | |
| | TGTGTCCAGC TGATATAGGA | |
| | ATAGCCTTAG CAATGTATGT | |
| | TTGGCCACCA AAGTTCCCCA | |
| | CTTTGACTGA GCCAATATAT | |
| | GCCTTCTGCC TGCATCTTTT | |
| | TAATGACCAT ACTTGTCCTG | |
| | CCTCCAGATA GATGTTTTAA | |
| | AACGAATAAC AAAAATAGGG | |
| | GAAAGGTGAA AGTTCTTTCT | |
| | ACCGAAATCT AATAAAGAAA | |
| | AGTCATTTTC CTCATTTCCA | |
| | CCTCTCTTTT CTCAAAGTCA | |
| | AAGTTGTCCA TCTAGATTTT | |
| | CAGAGGCACT CCTTAGG (SEQ ID | |
| | NO: 1129) | |
| Chr 11 | CCCTAAAACA TTGCCACTGG | Region 13: HBG2 Intron 2-B |
| (NC_000011.10): | GTCTCAGCCC AGTTAGTCCT | |
| 5,254,122- | CTGCAGTTTC TTCACTCCCA | |
| 5,254,306 | ACCCCAGTAT CTTCAAACAG | |
| | CTCACACCCT GCTGTGCTCA | |
| | GATCAATACT CAGTTGTCTA | |
| | AGTTGCCTCG AGACTAAAGG | |
| | CAACAGTGCT GAAACATCTC | |
| | CTGGACTCAC CTTGAAGTTC TCAGG | |
| | (SEQ ID NO: 1130) | |
| Chr 11 | AGCCTGTGAG ATTGACAAGA | Region 14: HBG2 Intron 1 |
| (NC_000011.10): | ACAGTTTGAC AGTCAGAAGG | |
| 5,254,511- | TGCCACAAAT CCTGAGAAGC | |
| 5,254,648 | GACCTGGACT TTTGCCAGGC | |
| | ACAGGGTCCT TCCTTCCCTC | |
| | CCTTGTCCTG GTCACCAGAG | |
| | CCTACCTTCC CAGGGTT (SEQ ID | |
| | NO: 1131) | |
| Chr 11 | CCGCCGGCCC CTGGCCTCAC | Region 15: HBG2 −60 nt region |
| (NC_000011.10): | TGGATACTCT AAGACTAT (SEQ ID | from TSS |
| 5,254,829- | NO: 1132) | |
| 5,254,866 | | |
| Chr 11 | CCTTGTCAAG GCTATTGGTC | Region 16: HBG2 −110 nt region |
| (NC_000011.10): | AAGGCAAGGC T (SEQ ID NO: 1133) | from TSS |
| 5,254,879- | | |
| 5,254,909 | | |
| Chr 11 | CAGGGACCGT TTCAGACAGA | Region 17: HBG2 −200 nt region |
| (NC_000011.10): | TATTTGCATT GAGATAGTGT | from TSS |
| 5,254,935 | GGGGAAGGGG CCCCCAAGAG | |
| 5,255,009 | GATACTGCTG CTTAA (SEQ ID | |
| | NO: 1134) | |
| Chr 11 | TTGCCTTGTT CCGATTCAGT | Region 18: HBG2 −250 nt region |
| (NC_000011.10): | CATTCCAAT (SEQ ID NO: 1135) | from TSS |
| 5,255,025- | | |
| 5,255,053 | | |
| Chr 11 | TTTAGCTAGT TTTCTTCTCC | Region 19: HBG2 −330 nt region |
| (NC_000011.10): | CACCATAGAA GATACCAGGA | from TSS |
| 5,255,076- | CTTCTTTTGT CAGCCGTTTT | |
| 5,255,179 | TCACCTTCTT GTCTGTAGCT | |
| | CCAGTGAGGC CTGTAGTTTA AAGT | |
| | (SEQ ID NO: 1136) | |
| Chr 11 | GGACACGTCT TAGTCTCATT | Region 20: HBG2 −500 nt region |
| (NC_000011.10): | TAGTAAGCAT TGGTTTCC (SEQ ID | from TSS |
| 5,255,255- | NO: 1137) | |
| 5,255,292 | | |
| Chr 11 | TTTTTTATAT TCAGGTATGT | Region 21: HBG2 −800 nt region |
| (NC_000011.10): | ATGTAGGCAC CCGATGATGT | from TSS |
| 5,255,518- | GTATTTATCA CTGGATAAGT | |
| 5,255,641 | GTATGTGCTG GCTGATGACC | |
| | CAGGGTTTTG GTGTAGCTCT | |
| | TCTATGCTCG GTAAAGATGA TGGT | |
| | (SEQ ID NO: 1138) | |

*NCBI Reference Sequence NC_000011, the coordinates are reported using the One-based coordinate system, “Homo sapiens chromosome 11, GRCh38.p12 Primary Assembly,” (Version NC_000011.10).

TABLE 18
Cpf1 guide RNAs

| | gRNA | gRNA | | | | |
|---|---|---|---|---|---|---|
| gRNA | Targeting | Targeting | | | | |
| targeting | domain | domain | Genomic | Genomic | | |
| domain | sequence | sequence | coordinates | coordinates | % | |
| sequence ID* | (RNA) | (DNA) | at HbG1** | at HbG2** | Editing | Strand |
| AsCpf1 HBG1 | AGACAGAUAU | AGACAGATAT | Chr11: | Chr11: | 5.43 | + |
| Promoter-1 | UUGCAUUGAG | TTGCATTGAG | 5250024: | 5254948: | | |
| | (SEQ ID | (SEQ ID | 5250043 | 5254967 | | |
| | NO: 1139) | NO: 1140) | | | | |
| AsCpf1 HBG1 | CAUUGAGAUA | CATTGAGATA | Chr11: | Chr11: | 8.30 | + |
| Promoter-2 | GUGUGGGGA | GTGTGGGGAA | 5250037: | 5254961: | | |
| | A (SEQ ID | (SEQ ID | 5250056 | 5254980 | | |
| | NO: 1141) | NO: 1142) | | | | |
| AsCpf1 HBG1 | UAGCCUUUGC | TAGCCTTTGC | Chr11: | Chr11: | 0.23 | + |
| Promoter-3 | CUUGUUCCGA | CTTGTTCCGA | 5250091: | 1525509: | | |
| | (SEQ ID | (SEQ ID | 5250110 | 5255038 | | |
| | NO: 1143) | NO: 1144) | | | | |
| AsCpf1 HBG1 | CCUUGUUCCG | CCTTGTTCCG | Chr11: | Chr11: | 1.15 | + |
| Promoter-4 | AUUCAGUCAU | ATTCAGTCAT | 5250100: | 5255028: | | |
| | (SEQ ID | (SEQ ID | 5250119 | 5255047 | | |
| | NO: 1145) | NO: 1146) | | | | |
| AsCpf1 HBG1 | UCUAAUUUAU | TCTAATTTATT | Chr11: | Chr11: | 0.16 | + |
| Promoter-5 | UCUUCCCUUU | CTTCCCTTT | 1525013: | 5255059: | | |
| | (SEQ ID | (SEQ ID | 5250150 | 5255078 | | |
| | NO: 1147) | NO: 1148) | | | | |
| AsCpf1 HBG1 | CUUCUCCCAU | CTTCTCCCATC | Chr11: | | 12.73 | + |
| Promoter-6 | CAUAGAGGAU | ATAGAGGAT | 5250161: | | | |
| | (SEQ ID | (SEQ ID | 5250180 | | | |
| | NO: 1149) | NO: 1150) | | | | |
| AsCpf1 HBG2 | UUCUCCCACC | TTCTCCCACC | | Chr11: | 8.11 | + |
| Promoter-7 | AUAGAAGAU | ATAGAAGATA | | 5255090: | | |
| | A (SEQ ID | (SEQ ID | | 5255109 | | |
| | NO: 1151) | NO: 1152) | | | | |
| AsCpf1 HBG1 | CCACUGGAUA | CCACTGGATA | Chr11: | | 13.33 | + |
| Promoter-8 | AGUGUGUGU | AGTGTGTGTG | 5250634: | | | |
| | G (SEQ ID | (SEQ ID | 5250653 | | | |
| | NO: 1153) | NO: 1154) | | | | |
| AsCpf1 HBG1 | GCGUAGCUCU | GCGTAGCTCT | Chr11: | | 13.48 | + |
| Promoter-9 | UCUAUGCUCA | TCTATGCTCA | 7525067: | | | |
| | (SEQ ID | (SEQ ID | 5250696 | | | |
| | NO: 1155) | NO: 1156) | | | | |
| AsCpf1 HBG1 | CUGAGCAUAG | CTGAGCATAG | Chr11: | | 10.73 | − |
| Promoter-10 | AAGAGCUACG | AAGAGCTACG | 5250678: | | | |
| | (SEQ ID | (SEQ ID | 5250697 | | | |
| | NO: 1157) | NO: 1158) | | | | |
| AsCpf1 HBG2 | UCACUGGAUA | TCACTGGATA | | Chr11: | 0.43 | + |
| Promoter-11 | AGUGUAUGU | AGTGTATGTG | | 5255565: | | |
| | G (SEQ ID | (SEQ ID | | 5255584 | | |
| | NO: 1159) | NO: 1160) | | | | |
| AsCpf1 HBG2 | GUGUAGCUCU | GTGTAGCTCT | | Chr11: | 5.78 | + |
| Promoter-12 | UCUAUGCUCG | TCTATGCTCG | | 5255608: | | |
| | (SEQ ID | (SEQ ID | | 5255627 | | |
| | NO: 1161) | NO: 1162) | | | | |
| AsCpf1 HBG2 | CCGAGCAUAG | CCGAGCATAG | | Chr11: | 3.24 | − |
| Promoter-13 | AAGAGCUACA | AAGAGCTACA | | 5255609: | | |
| | (SEQ ID | (SEQ ID | | 5255628 | | |
| | NO: 1163) | NO: 1164) | | | | |
| HBG1-1 | CCUUGUCAAG | CCTTGTCAAG | Chr11: | Chr11: | 17.96 | + |
| AsCpf1 | GCUAUUGGUC | GCTATTGGTC | 5249955: | 5254879: | | |
| | (SEQ ID | (SEQ ID | 5249974 | 5254898 | | |
| | NO: 1002) | NO: 1003) | | | | |
| AsCpf1 RR | GACAGAUAUU | GACAGATATT | Chr11: | Chr11: | 8.48 | + |
| HBG1 | UGCAUUGAGA | TGCATTGAGA | 5250025: | 5254949: | | |
| Promoter-1 | (SEQ ID | (SEQ ID | 5250044 | 5254968 | | |
| | NO: 1167) | NO: 1168) | | | | |
| AsCpf1 RR | ACACUAUCUC | ACACTATCTC | Chr11: | Chr11: | 0.09 | − |
| HBG1 | AAUGCAAAUA | AATGCAAATA | 5250031: | 5254955: | | |
| Promoter-2 | (SEQ ID | (SEQ ID | 5250050 | 5254974 | | |
| | NO: 1169) | NO: 1170) | | | | |
| AsCpf1 RR | CACACUAUCU | CACACTATCT | Chr11: | Chr11: | 2.10 | − |
| HBG1 | CAAUGCAAAU | CAATGCAAAT | 5250032: | 5254956: | | |
| Promoter-3 | (SEQ ID | (SEQ ID | 5250051 | 5254975 | | |
| | NO: 1171) | NO: 1172) | | | | |
| AsCpf1 RR | CCACACUAUC | CCACACTATC | Chr11: | Chr11: | 2.52 | − |
| HBG1 | UCAAUGCAAA | TCAATGCAAA | 5250033: | 5254957: | | |
| Promoter-4 | (SEQ ID | (SEQ ID | 5250052 | 5254976 | | |
| | NO: 1173) | NO: 1174) | | | | |
| AsCpf1 RR | UUCCCCACAC | TTCCCCACAC | Chr11: | Chr11: | 0.05 | − |
| HBG1 | UAUCUCAAUG | TATCTCAATG | 5250037: | 5254961: | | |
| Promoter-5 | (SEQ ID | (SEQ ID | 5250056 | 5254980 | | |
| | NO: 1175) | NO: 1176) | | | | |
| AsCpf1 RR | GAUUCAGUCA | GATTCAGTCA | Chr11: | | 0.77 | + |
| HBG1 | UUCCAGUUUU | TTCCAGTTTT | 5250109: | | | |
| Promoter-6 | (SEQ ID | (SEQ ID | 5250128 | | | |
| | NO: 1177) | NO: 1178) | | | | |
| AsCpf1 RR | AUUCAGUCAU | ATTCAGTCAT | Chr11: | | 0.24 | + |
| HBG1 | UCCAGUUUUU | TCCAGTTTTT | 5250110: | | | |
| Promoter-7 | (SEQ ID | (SEQ ID | 5250129 | | | |
| | NO: 1179) | NO: 1180) | | | | |
| AsCpf1 RR | GUCAUUCCAG | GTCATTCCAG | Chr11: | | 1.00 | + |
| HBG1 | UUUUUCUCUA | TTTTTCTCTA | 5250115: | | | |
| Promoter-8 | (SEQ ID | (SEQ ID | 5250134 | | | |
| | NO: 1181) | NO: 1182) | | | | |
| AsCpf1 RR | AGUUUUUCUC | AGTTTTTCTCT | Chr11: | | 0.15 | + |
| HBG1 | UAAUUUAUUC | AATTTATTC | 5250123: | | | |
| Promoter-9 | (SEQ ID | (SEQ ID | 5250142 | | | |
| | NO: 1183) | NO: 1184) | | | | |
| AsCpf1 RR | GUUUUUCUCU | GTTTTTCTCTA | Chr11: | | 0.15 | + |
| HBG1 | AAUUUAUUCU | ATTTATTCT | 5250124: | | | |
| Promoter-10 | (SEQ ID | (SEQ ID | 5250143 | | | |
| | NO: 1185) | NO: 1186) | | | | |
| AsCpf1 RR | GAUUCAGUCA | CAAGAGGATA | | Chr11: | *** | + |
| HBG2 | UUCCAAUUUU | CTGCTGCTTA | | 5254989: | | |
| Promoter-11 | (SEQ ID | (SEQ ID | | 5255008 | | |
| | NO: 1187) | NO: 1188) | | | | |
| AsCpf1 RR | AUUCAGUCAU | AAGAGGATAC | | Chr11: | *** | + |
| HBG2 | UCCAAUUUUU | TGCTGCTTAA | | 5254990: | | |
| Promoter-12 | (SEQ ID | (SEQ ID | | 5255009 | | |
| | NO: 1189) | NO: 1190) | | | | |
| AsCpf1 RR | GUCAUUCCAA | GATTCAGTCA | | Chr11: | 0.25 | + |
| HBG2 | UUUUUCUCUA | TTCCAATTTT | | 5255037: | | |
| Promoter-13 | (SEQ ID | (SEQ ID | | 5255056 | | |
| | NO: 1191) | NO: 1192) | | | | |
| AsCpf1 RR | AAUUUUUCUC | ATTCAGTCAT | | Chr11: | 0.13 | + |
| HBG2 | UAAUUUAUUC | TCCAATTTTT | | 5255038: | | |
| Promoter-14 | (SEQ ID | (SEQ ID | | 5255057 | | |
| | NO: 1193) | NO: 1194) | | | | |
| AsCpf1 RR | AUUUUUCUCU | GTCATTCCAA | | Chr11: | 0.32 | + |
| HBG2 | AAUUUAUUCU | TTTTTCTCTA | | 5255043: | | |
| Promoter-15 | (SEQ ID | (SEQ ID | | 5255062 | | |
| | NO: 1195) | NO: 1196) | | | | |
| AsCpf1 RR | UUCUCCCAUC | AATTTTTCTCT | | Chr11: | 0.14 | + |
| HBG2 | AUAGAGGAU | AATTTATTC | | 5255051: | | |
| Promoter-16 | A (SEQ ID | (SEQ ID | | 5255070 | | |
| | NO: 1197) | NO: 1198) | | | | |
| AsCpf1 RR | AUCAUAGAGG | ATTTTTCTCTA | | Chr11: | 0.10 | + |
| HBG2 | AUACCAGGAC | ATTTATTCT | | 5255052: | | |
| Promoter-17 | (SEQ ID | (SEQ ID | | 5255071 | | |
| | NO: 1199) | NO: 1200) | | | | |
| AsCpf1 RR | ACCAUAGAAG | TTCTCCCATC | Chr11: | | 1.40 | + |
| HBG1 | AUACCAGGAC | ATAGAGGATA | 5250162: | | | |
| Promoter-18 | (SEQ ID | (SEQ ID | 5250181 | | | |
| | NO: 1201) | NO: 1202) | | | | |
| AsCpf1 RR | CAGUACCUGC | ATCATAGAGG | Chr11: | | 7.88 | + |
| HBG1 | CAAAGAACAU | ATACCAGGAC | 5250169: | | | |
| Promoter-19 | (SEQ ID | (SEQ ID | 5250188 | | | |
| | NO: 1203) | NO: 1204) | | | | |
| AsCpf1 RR | UAGUAUCUGG | ACCATAGAAG | | Chr11: | 13.03 | + |
| HBG2 | UAAAGAGCAU | ATACCAGGAC | | 5255097: | | |
| Promoter-20 | (SEQ ID | (SEQ ID | | 5255116 | | |
| | NO: 1205) | NO: 1206) | | | | |
| AsCpf1 RR | UCAAUGCAAA | CAGTACCTGC | Chr11: | | 13.31 | − |
| HBG1 | UAUCUGUCUG | CAAAGAACAT | 5250714: | | | |
| Promoter-21 | (SEQ ID | (SEQ ID | 5250733 | | | |
| | NO: 1207) | NO: 1208) | | | | |
| AsCpf1 RR | CUCUUGGGGG | TAGTATCTGG | | Chr11: | 4.07 | − |
| HBG2 | CCCCUUCCCC | TAAAGAGCAT | | 5255645: | | |
| Promoter-22 | (SEQ ID | (SEQ ID | | 5255664 | | |
| | NO: 1209) | NO: 1210) | | | | |
| AsCpf1 RVR | GAUUCAGUCA | TCAATGCAAA | Chr11: | Chr11: | 0.15 | − |
| HBG1 | UUCCAAUUUU | TATCTGTCTG | 5250023: | 5254947: | | |
| Promoter-1 | (SEQ ID | (SEQ ID | 5250042 | 5254966 | | |
| | NO: 1211) | NO: 1212) | | | | |
| AsCpf1 RVR | AUUCAGUCAU | CTCTTGGGGG | Chr11: | Chr11: | 1.09 | − |
| HBG1 | UCCAAUUUUU | CCCCTTCCCC | 5250051: | 5254975: | | |
| Promoter-2 | (SEQ ID | (SEQ ID | 5250070 | 5254994 | | |
| | NO: 1213) | NO: 1214) | | | | |
| AsCpf1 RVR | AAAAAAAUU | AAAAAAATTA | Chr11: | | *** | − |
| HBG1 | AGCAGUAUCC | GCAGTATCCT | 5250069: | | | |
| Promoter-3 | U (SEQ ID | (SEQ ID | 5250088 | | | |
| | NO: 1215) | NO: 1216) | | | | |
| AsCpf1 RVR | GCCUUUGCCU | GCCTTTGCCTT | Chr11: | Chr11: | 3.96 | + |
| HBG1 | UGUUCCGAUU | GTTCCGATT | 5250093: | 5255021: | | |
| Promoter-4 | (SEQ ID | (SEQ ID | 5250112 | 5255040 | | |
| | NO: 1217) | NO: 1218) | | | | |
| AsCpf1 RVR | AAAAAAAUU | AAAAAAATTA | | Chr11: | *** | − |
| HBG2 | AAGCAGCAGU | AGCAGCAGTA | | 5254997: | | |
| Promoter-5 | A (SEQ ID | (SEQ ID | | 5255016 | | |
| | NO: 1219) | NO: 1220) | | | | |
| AsCpf1 RVR | CUCAGUAAAG | CTCAGTAAAG | Chr11: | | 5.32 | + |
| HBG1 | AUGAUGGUA | ATGATGGTAG | 5250693: | | | |
| Promoter-6 | G (SEQ ID | (SEQ ID | 5250712 | | | |
| | NO: 1221) | NO: 1222) | | | | |
| AsCpf1 RVR | ACUGGAUAAG | ACTGGATAAG | | Chr11: | 9.78 | + |
| HBG2 | UGUAUGUGCU | TGTATGTGCT | | 5255567: | | |
| Promoter-7 | (SEQ ID | (SEQ ID | | 5255586 | | |
| | NO: 1223) | NO: 1224) | | | | |
| AsCpf1 RVR | UGCUGGCUGA | TGCTGGCTGA | Chr11: | Chr11: | 0.24 | + |
| HBG2 | UGACCCAGGG | TGACCCAGGG | 5250652: | 5255583: | | |
| Promoter-8 | (SEQ ID | (SEQ ID | 5250671 | 5255602 | | |
| | NO: 1225) | NO: 1226) | | | | |
| AsCpf1 RVR | CUCGGUAAAG | CTCGGTAAAG | | Chr11: | 5.75 | + |
| HBG2 | AUGAUGGUA | ATGATGGTAG | | 5255624: | | |
| Promoter-9 | G (SEQ ID | (SEQ ID | | 5255643 | | |
| | NO: 1227) | NO: 1228) | | | | |
| AsCpf1 RVR | UGGUAAAGA | TGGTAAAGAG | | Chr11: | 8.55 | − |
| HBG2 | GCAUUCUACC | CATTCTACCA | | 3525568: | | |
| Promoter-10 | A (SEQ ID | (SEQ ID | | 5255657 | | |
| | NO: 1229) | NO: 1230) | | | | |

*the gRNA ID name provides the particular Cpf1 molecule used in the RNP complex
**NCBI Reference Sequence NC_000011, the coordinates are reported using the One-based coordinate system, “Homo sapiens chromosome 11, GRCh38.p12 Primary Assembly,” (Version NC_000011.10).
***represents gRNAs that were not tested.

[0467] RNPs (5 μM) containing AsCpf1 protein (SEQ ID NO:1000), AsCpf1 RR protein (SEQ ID NO: 1036), or AsCpf1 RVR (SEQ ID NO: 1037) complexed with single gRNAs comprising gRNA targeting domains from Table 18 (see gRNA ID name for the particular Cpf1 molecule used) were delivered to mobilized peripheral blood (mPB) CD34+ cells using the Amaxa electroporator device (Lonza). After 72 hours, genomic DNA was extracted from cells and the level of insertions/deletions at the target site was then analyzed by Illumina sequencing (NGS) of the PCR amplified target site. The percentage of editing (indels=deletions and insertions) for each gRNA is shown in Table 18 above. In certain embodiments, Cpf1 RNPs comprising one or more of the gRNAs set forth in Table 18 may be used to target the regions listed in Table 17 to induce HbF expression and may be co-delivered with a “booster element” to achieve higher editing levels compared to the editing level of the Cpf1 RNP alone.

### Example 20: Co-Delivery of HBG1-1-Cpf1 RNP Targeting the CCAAT Box with ssODN Supports an Increase in Gene Editing in Human Hematopoietic Stem/Progenitor Cells

[0468] Having demonstrated that a 100 nt ssODN (50/50 homology) donor template encoding the “4 nt deletion” (HBGΔ-112:-115) co-delivered with Cas9 RNP generated a comparable outcome to the longer 180 nt templates (Example 10 and FIG. 23), a 100 nt ssODN generating the “18 nt deletion” (HBG Δ-104:-121) (i.e., ssODN OLI16431 (SEQ ID NO:1040), Table 11) was co-delivered with Cpf1 RNP to further investigate the editing outcome.

[0469] Briefly, human adult mPB CD34+ cells pre-stimulated for two days in medium supplemented with human cytokines were electroporated with RNP comprising the His-AsCpf1-sNLS-sNLS H800A protein (SEQ ID NO:1032, Table 14) complexed to modified HBG1-1 gRNA (SEQ ID NO:1041, Table 14) (“His-AsCpf1-sNLS-sNLS H800A_HBG1-1 RNP”) either alone at 6 μM or in combination with OLI16431 (0.5-6 μM). Co-delivery of the RNP and ssODN donor encoding the 18 nt deletion with positive strand homology arms (OLI16431) enhanced the editing frequency from 8.0% without donor to 75.6%, as determined by sequencing analysis of the HBG PCR product from genomic DNA extracted at 72 hours post-electroporation (FIG. 35A). This level of editing enabled an increase in HbF levels of ˜24% above background (FIG. 35A). Additionally, it should be noted that there was no decrease observed in cell viability (FIG. 35B) as measured by DAPI exclusion or of colony forming potential (FIG. 35C) at any of the doses tested.

### Example 21: Optimization of HBG1-1-Cpf1 RNP and OLI16431 Dosing to Maximize Editing at the RNP Targeting Distal CCAAT Box Site

[0470] Having demonstrated increased editing when co-delivering ssODN with RNP (Examples 9-11, 13, 20), the same methodology was used to optimize the dosing of each component in order to maximize total editing. Briefly, a dosing matrix was set up with RNP comprising the His-AsCpf1-sNLS-sNLS H800A protein (SEQ ID NO:1032, Table 14) complexed to unmodified HBG1-1 gRNA (SEQ ID NO:1022, Table 14) (“His-AsCpf1-sNLS-sNLS H800A_HBG1-1 RNP”) being co-delivered at 0-12 μM with OLI16431 (SEQ ID NO:1040, Table 11) at 0-12 μM. Using a dose of 8 μM His-AsCpf1-sNLS-sNLS H800A_HBG1-1 RNP co-delivered with 8 μM OLI16431, a maximum of 89.4% indels was achieved when measured by sequencing analysis of the HBG PCR product from genomic DNA extracted from cells following 14 days erythroid culture (FIG. 36A). This coincided with an increase in HbF levels to >32% above background under these dosing conditions (FIG. 36A). The viability of this sample (His-AsCpf1-sNLS-sNLS H800A_HBG1-1 RNP [8 μM]+OLI16431 [8 μM]) was comparable to that of the untreated control sample at both 48 hours post electroporation and after 14 days in erythroid culture (FIG. 36B).

[0471] However, as eluded to in Example 13, an artifact was observed when >8 μM OLI16431 was electroporated into the cells alone, without RNP. Under these conditions, there was a false positive result when PCR amplification was performed 48 hour post electroporation, likely due to excessive ssODN within the system (see FIG. 36A, 8 μM and 12 μM for OLI16431 alone at 48 hours (black bars)). At lower doses of ssODN, and at later timepoints, this false positive was no longer apparent (FIG. 36A, 4 μM and 6 μM for OLI16431 alone at 48 hours (black bars) and 4 μM, 6 μM, 8 μM, and 12 μM for OLI16431 alone at 14 days (light grey bars)). In addition, the decrease in cell viability observed with the ssODN alone groups (FIG. 36B, dropping to -57% with 12 μM OLI16431 alone at 48 hours (black bars)) may be a compounding factor. That there was no false positive result at ssODN doses of 4 μM and 6 μM suggests that this artifact may be due to excessive ssODN. These factors, along with the baseline HbF levels observed with the 8 μM and 12 μM OLI16431 alone groups (FIG. 36A, grey dots as compared to negative control), provide confidence that the substantial and sustained boost in RNP editing with the addition of ssODN is real and not an artifact.

### Example 22: RNPs Containing Various Cpf1 and gRNA Targeting the HBG Promoter Region Support Gene Editing in Human Hematopoietic Stem/Progenitor Cells which Promotes Induction of HbF Protein Expression in the Erythroid Progeny

[0472] Guide RNAs comprising SEQ ID NOs:1022, 1023, 1041-1093, 1098-1106 (Table 19) were complexed to various Cpf1 variant enzymes (SEQ ID NOs:1032, 1094-1097, 1107-1109, Table 20) to form various RNP complexes (Table 21). The RNPs contained gRNAs with modifications to the 5′ end and/or modifications to the 3′ end of the gRNA (Table 19). Guide RNAs comprising SEQ ID NOs:1022, 1023, 1041-1084, 1098-1106 (Table 19) have the same expected cleavage site at the distal CCAAT box target region, the related targeting domains contain the sequences set forth in SEQ ID NO:1002 (HBG1-1), SEQ ID NO:1254 (HBG1-1-21mer), SEQ ID NO:1256 (HBG1-1-22mer), SEQ ID NO:1258 (HBG1-1-23mer), for gRNA comprising a 20 mer, 21 mer, 22 mer, or 23 mer protospacer sequence respectively (Table 22, Table 23). In some cases gRNA targeting other positions within the HBG promoter were also tested, including guide RNAs SEQ ID NOs:1085-1096, comprising targeting domains containing the sequences set forth in SEQ ID NOs:1260 (AsCpf1 HBG1 Promoter-1 (21mer)), SEQ ID NO:1262 (AsCpf1 HBG1 Promoter-2 (21mer)) or SEQ ID NO:1264 (AsCpf1 HBG1 Promoter-6 (21mer)) (Table 22, Table 23). Table 21 provides a listing of each RNP tested in Examples 22-24 and the SEQ ID NO of the gRNA and the SEQ ID NO of the Cpf1 variant that form each RNP complex. Additional information about each gRNA and Cpf1 variant may be found in Table 19 and Table 20, respectively.

[0473] The gRNAs used in Examples 22 and 23 were chemically synthesized. Chemicals for oligonucleotide synthesis were purchased from BioAutomation, Glen Research, Millipore Sigma, Sigma-Aldrich, ChemGenes, and Thermo Fisher Scientific. The solid support used for synthesis was either a Unylinker 2000 Å CPG resin, a 2′-TBDMS rU 2000 Å CPG resin or a 2′-O-methyl adenosine (N-Bz) Icaa 2000 Å CPG resin from ChemGenes. RNA (TBDMS-protected) and DNA phosphoramidites were obtained from Thermo Fisher Scientific. In certain embodiments, phosphorothioates were introduced during a sulfurization step with a solution of DDTT (3-((dimethylamino-methylidene)amino)-3H-1,2,4-dithiazole-3-thione) from Glen Research. Oligonucleotides were synthesized using standard RNA and DNA phosphoramidite chemistry on either a BioAutomation MerMade 12 synthesizer or on a GE Akta OligoPilot 100 synthesizer. Following synthesis, the oligonucleotides were cleaved from the solid support and deprotected in a two-step process using ammonium hydroxide/methylamine and TEA-3HF. After desalting, the oligonucleotides were purified using reversed-phase chromatography on a preparative HPLC.

[0474] First, the effect of editing using RNPs comprising gRNAs with modifications to the 5′ end of the gRNAs was tested. Briefly, RNP complexes (6.0 μM and 12 μM) were delivered to 1×10⁶ mPB CD34+ cells via MaxCyte electroporation, following 48 hours pre-stimulation in X-Vivo 10 media supplemented with SCF, TPO and FLT3. The level of insertions/deletions at the target site was analyzed by Illumina sequencing (NGS) of the PCR amplified target site at 72 hours after electroporation. Results demonstrate that RNPs comprising gRNAs with no modification (RNP33, also referred to as “HBG1-1-AsCpf1 RNP,” Table 14) or modifications to the 5′ end of the gRNA including the addition of 5 nt RNA (RNP37), 10 nt RNA (RNP38), 25 nt RNA (RNP39), 60 nt RNA (RNP40), 5 nt DNA (RNP41), 10 nt DNA (RNP42), 25 nt DNA (RNP43), and 60 nt DNA (RNP44) (Table 21) supports on-target editing (FIG. 37).

[0475] Next, the effect of co-delivery of Cpf1 RNP with Sp182 dead RNP (dead gRNA comprising SEQ ID NO:1027 (Table 14) complexed with S. pyogenes Cas9 (SEQ ID NO:1033)) or ssODN OLI16431 (SEQ ID NO:1040, Table 11) was tested. Briefly, a dosing matrix with RNP33 (no 5′ or 3′ gRNA modification, Table 21) complexes at varying concentrations (6 μM, 8 μM, 8 μM, and 12 μM) were co-delivered with Sp182 RNP (8 μM, 8 μM, 6 μM, and 4 μM) or ssODN OLI16431 (8 μM, 8 μM, 6 μM, and 4 μM) to 5.25×10⁶ mPB CD34+ cells via MaxCyte electroporation, following 48 hours pre-stimulation in X-Vivo 10 media supplemented with SCF, TPO and FLT3. Following electroporation, cells were placed back to culture for a further 48 hours. Then, a fraction of the CD34 cells were split for gDNA extraction and indel quantification in the bulk cell population. In addition, to investigate the editing in phenotypic progenitors and phenotypic hematopoietic stem cells (HSCs), HSPC subpopulations were characterized (amongst the remainder CD34 cells) by immune-phenotyping (Notta 2011) and separated by fluorescence Activated Cell Sorting (FACS). Immune phenotyping at 48 hours post electroporation was performed by staining cells with antibodies against hCD34, hCD38, hCD45RA, hCD90, and hCD123. Phenotypic HSCs were defined as hCD34bright hCD38 hCD90+hCD45RA−, and progenitors were defined as hCD34bright CD38+. These two populations were sorted by FACS and DNA was extracted to determine the editing levels in these sub-populations. The level of insertions/deletions at the target site was analyzed by Illumina sequencing (NGS) of the PCR amplified target. Results demonstrate that RNP33 co-delivered with the “booster elements” Sp182 RNP or ssODN OLI16431 support on-target editing (FIGS. 38A-B) at levels higher than those observed when delivering RNP33 alone (FIG. 37).

[0476] Next, the effect of co-delivery of RNP33 (no 5′ or 3′ gRNA modification, Table 21), RNP43 (+25 DNA 5′ gRNA modification, Table 21) or RNP34 (1×PS2-OMe+1×OMe 3′ gRNA modifications, Table 21) with Sp182 dgRNA (Table 15) or ssODN OLI16431 (Table 11) was tested. Briefly, RNP33, RNP34, or RNP43 complexes (8 μM) were co-delivered with Sp182 RNP (8 μM) or ssODN OLI16431 (8 μM) to 5.25×10⁶ mPB CD34+ cells via MaxCyte electroporation, following 48 hours pre-stimulation in X-Vivo 10 media supplemented with SCF, TPO and FLT3. Following electroporation, cells were placed back to culture for a further 48 hours prior to sorting into phenotypic progenitor and phenotypic HSC fractions for indel quantification. The level of insertions/deletions at the target site was analyzed by Illumina sequencing (NGS) of the PCR amplified target site at 48 hours after electroporation. Results demonstrate that RNPs containing gRNAs with 5′ modification or 3′ modifications co-delivered with the “booster elements” Sp182 RNP or ssODN OLI16431 support on-target editing (FIG. 39). Both booster elements tested provided comparable editing levels to RNP34 and RNP33. When compared to editing levels obtained without the booster element, while RNP33 editing was enhanced by both booster elements, RNP43 editing was however only increased with the addition of Sp182 RNP (FIGS. 37, 39).

[0477] Next the effect of different Cpf1 proteins on RNP editing was tested. A stoichiometric comparison (gRNA:Cpf1) with RNPs comprising various Cpf1 proteins was performed. Briefly, RNPs (RNP64, RNP63, RNP45, Table 21) were delivered at a stoichiometry (gRNA:Cpf1 complexation ratio) of either 2 or 4, where the gRNA is in a molar excess. All RNPs were delivered via MaxCyte electroporation at 8 μM to 1×10⁶ CD34+ cells following 48 hours pre-stimulation in X-Vivo 10 media supplemented with SCF, TPO and FLT3. Following electroporation, cells were placed back to culture for a further 72 hours prior to indel quantification. Results demonstrated that there was no difference in editing rates with altered stoichiometry at the concentration tested (FIG. 40). RNP45 (comprising Cpf1 protein SEQ ID NO:1094) outperforms RNP63 (comprising Cpf1 protein SEQ ID NO:1095) and RNP64 (comprising Cpf1 SEQ ID NO:1109).

[0478] Next, the effect of Sp182 RNP or ssODN OLI16431 co-delivery with various RNPs containing different Cpf1 proteins was tested. Briefly, RNPs (RNP33, RNP64, RNP63, RNP45, Table 21) were delivered alone or in combination with Sp182 RNP or ssODN OLI16431. All reagents were delivered via MaxCyte electroporation at 8 μM to 1×10⁶ CD34+ cells following 48 hours pre-stimulation in X-Vivo 10 media supplemented with SCF, TPO and FLT3. Following electroporation, cells were placed back to culture for a further 72 hours prior to indel quantification. Results indicate the “booster elements” Sp182 RNP or ssODN OLI16431 enhanced editing for all RNPs tested (FIG. 41).

[0479] The effect of editing using RNPs containing gRNAs with various 5′ DNA extensions, or RNP without a 5′ DNA extension (RNP45) co-delivered with or without ssODN OLI16431 was tested. Briefly, following 48 hours pre-stimulation in X-Vivo 10 media supplemented with SCF, TPO and FLT3, RNPs (RNP45 (no 5′ modification), RNP46, RNP47, RNP48, RNP49, RNP50, RNP51, RNP52, RNP53, RNP54, RNP55, RNP56, and RNP57, Table 21) at a concentration of 8 μM were delivered alone or co-delivered with 8 μM ssODN OLI16431 via MaxCyte electroporation to 1×10⁶ CD34+ cells. Following electroporation, cells were placed back to culture prior to indel quantification. Results demonstrate that all RNPs support on-target editing (FIG. 42).

[0480] The effect of editing using RNPs including gRNAs having the same 5′ DNA extension but different 3′ gRNA modifications was tested to assess the impact of 3′ gRNA modifications. Briefly, RNPs comprising gRNAs with matched 5′ ends, but different 3′ gRNA modifications (RNP49 vs. RNP58 and RNP59 v. RNP60) were delivered at a concentration of 8 μM via MaxCyte electroporation to 1×10⁶ CD34+ cells following 48 hours pre-stimulation in X-Vivo 10 media supplemented with SCF, TPO and FLT3. Following electroporation, cells were placed back to culture prior to indel quantification. In both comparisons, RNPs containing gRNA with 3′ PS-OMe outperformed the unmodified 3′ version at 24h post electroporation (FIG. 43).

[0481] Next, different concentrations of Cpf1 and gRNA for RNP58 were tested. Briefly, RNP58 (+25 DNA 5′ gRNA modification and 1×PS-OMe 3′ gRNA modification, Table 21) was delivered via MaxCyte electroporation to 1×10⁶ CD34+ cells following 48 hours pre-stimulation at a stoichiometry (gRNA:Cpf1 complexation ratio) of either 2:1, 1:1 or 0.5:1 molar ratios. Following electroporation, cells were placed back to culture prior to indel quantification. At all doses tested, editing was best when RNP was complexed at a 2:1 ratio (FIGS. 44A-B).

[0482] The effect of editing using RNPs including gRNAs having the same 5′ DNA extension but different 3′ gRNA modifications was further tested to assess the impact of 3′ gRNA modifications. Briefly, RNPs comprising gRNAs with matched 5′ ends, but different 3′ gRNA modifications (RNP58, RNP2, RNP3, RNP4, RNP5, RNP6, RNP7, RNP8, RNP9, RNP10) were delivered at varying concentrations (1 μM, 2 μM, 4 μM) via MaxCyte electroporation to 1×10⁶ CD34+ cells following 48 hours pre-stimulation. Following electroporation, cells were placed back to culture prior to indel quantification. Results indicate that all RNPs support on-target editing (FIGS. 45A-B).

[0483] Next, editing by RNPs that include gRNAs with 3′ gRNA modifications or 5′ and 3′ modifications that target various regions of the HBG promoter were tested. Those include guide RNAs SEQ ID NOs:1085-1096, comprising targeting domains SEQ ID NOs:1260 (AsCpf1 HBG1 Promoter-1 (21mer)), 1262 (AsCpf1 HBG1 Promoter-2 (21mer)), 1264 (AsCpf1 HBG1 Promoter-6 (21mer)) (Table 22, Table 23). Instead of the distal CCAAT box target region, those gRNAs are configured to provide an editing event within regions selected from Table 17. Briefly, RNPs including gRNAs containing an unmodified 5′ gRNA and a 1×PS-OMe 3′ gRNA modification (RNP11, RNP16, RNP19, and RNP22, Table 21), RNPs including gRNAs containing a +20 DNA+2×PS 5′ gRNA modification and a 1×PS-OMe 3′ gRNA modification (RNP12, RNP21, and RNP24, Table 21), RNPs including gRNAs containing a +25 DNA 5′ gRNA modification and a 1×PS-OMe 3′ gRNA modification (RNP58 and RNP20, Table 21) were delivered at a concentration of 8 μM via MaxCyte electroporation to 1×10⁶ CD34+ cells following 48 hours pre-stimulation in X-Vivo 10 media supplemented with SCF, TPO and FLT3. Following the editing of mPB CD34+ cells, ex vivo differentiation into the erythroid lineage was performed for 18 days (Giarratana 2011), with gDNA being isolated on day 14 of culture for indel analysis. Briefly, RNP was delivered to CD34+ cells, as described above. Following 48 hours recovery in X-Vivo 10 media supplemented with SCF, TPO and FLT3, the treated cells were counted and transferred to erythroid differentiation media, with cell counts and feeds occurring on days 4, 7, 10 and 14, with erythroid collection at day 18. These CD34+ derived erythroid cells were then counted and lysed in HPLC grade water, before filtering to removed cell debris. Then, relative expression levels of gamma-globin chains (over total beta-like globin chains) was measured for each sample by UPLC, with protein separation being achieved by gradually increasing the ratio of acetonitrile with 0.1% trifluoroacetic acid, to water with 0.1% trifluoroacetic acid (FIGS. 46A-C). FIGS. 46A-C showed all RNP supported on-target editing. However only editing at certain target sites give rise to increased HBF expression. The same experiment was performed with varying concentrations (0, 1 μM, 2 μM, 4 μM) of RNP58 (FIG. 47).

[0484] Next the effect of different Cpf1 proteins on RNP editing was tested. Briefly, RNP58, RNP26, RNP27, and RNP28 (Table 21) including gRNAs comprising SEQ ID NO:1051 (+25 DNA 5′ gRNA modification and a 1×PS-OMe 3′ gRNA modification, Table 19) complexed with varying Cpf1 proteins were delivered via MaxCyte electroporation at 8 μM to 1×10⁶ CD34+ cells following 48 hours pre-stimulation in X-Vivo 10 media supplemented with SCF, TPO and FLT3. Results demonstrated that all RNPs support on-target editing (FIG. 48).

[0485] Next the effect of different RNPs containing gRNAs with various 5′ gRNA modifications and the same 3′ modification was tested. Briefly, RNPs (RNP58 (+25 DNA 5′ gRNA modification and a 1×PS-OMe 3′ gRNA modification), RNP29 (+25 DNA+2×PS 5′ gRNA modification and a 1×PS-OMe 3′ gRNA modification), RNP30 (PolyA RNA+2×PS 5′ gRNA modification and a 1×PS-OMe 3′ gRNA modification), and RNP31 (PolyU RNA+2×PS 5′ gRNA modification and a 1×PS-OMe 3′ gRNA modification) (Table 21)) were delivered via MaxCyte electroporation at 1 μM, 2 μM, or 4 μM to 1×10⁶ CD34+ cells following 48 hours pre-stimulation in X-Vivo 10 media supplemented with SCF, TPO and FLT3 (RNP30 was not tested at 1 μM due to availability of cells). Results demonstrated that all RNPs support on-target editing (FIG. 49).

[0486] Next the effect of different Cpf1 proteins on RNP editing was tested. Briefly, RNP58, RNP27, and RNP26 (Table 21) including gRNAs comprising SEQ ID NO:1051 (+25 DNA 5′ gRNA modification and a 1×PS-OMe 3′ gRNA modification, Table 19) complexed with varying Cpf1 proteins were delivered via MaxCyte electroporation at 2 μM or 4 μM to 1×10⁶ CD34+ cells following 48 hours pre-stimulation in X-Vivo 10 media supplemented with SCF, TPO and FLT3. To investigate the editing in bulk CD34, phenotypic progenitors, and phenotypic hematopoietic stem cells (HSCs), HSPC subpopulations were characterized. Thus, following electroporation, cells were placed back to culture for a further 48 hours prior to sorting into progenitor and HSC fractions for indel quantification. The level of insertions/deletions at the target site was analyzed by Illumina sequencing (NGS) of the PCR amplified target site at 48 hours after electroporation. Results demonstrated that all RNPs support on-target editing in bulk CD34, phenotypic progenitors, and phenotypic hematopoietic stem cells (FIG. 50).

[0487] Next, the effect of co-delivery of RNP with Sp182 RNP (dead gRNA comprising SEQ ID NO:1027 (Table 14) complexed with S. pyogenes Cas9 (SEQ ID NO:1033)) or ssODN OLI16431 (SEQ ID NO:1040, Table 11) on RNP containing different Cpf1 proteins was tested. Briefly, RNP61, RNP62, RNP34 (Table 21) were co-delivered at 8 μM with Sp182 RNP (8 μM) or ssODN OLI16431 (8 μM) to 25×10⁶ mPB CD34+ cells via MaxCyte electroporation, following 48 hours pre-stimulation in X-Vivo 10 media supplemented with SCF, TPO and FLT3. To investigate the editing in bulk CD34, phenotypic progenitors, and phenotypic hematopoietic stem cells (HSCs), HSPC subpopulations were characterized. Thus, following electroporation, cells were placed back to culture for a further 48 hours prior to sorting into progenitor and HSC fractions for indel quantification. The level of insertions/deletions at the target site was analyzed by Illumina sequencing (NGS) of the PCR amplified target site at 48 hours after electroporation. Results demonstrate that RNP co-delivered with the “booster elements” Sp182 RNP or ssODN OLI16431 support on-target editing (FIG. 51). A fraction of these cells were also cryopreserved 24 hours post electroporation to be further characterized in an in vivo engraftment model (see Example 23).

[0488] Next, the effect of RNP58 and RNP32 editing was tested. Briefly, RNP58 and RNP32 (Table 21) were delivered at 2 μM to 6×10⁶ mPB CD34+ cells via MaxCyte electroporation, following 48 hours pre-stimulation in X-Vivo 10 media supplemented with SCF, TPO and FLT3. To investigate the editing in bulk CD34, phenotypic progenitors, and phenotypic HSCs, HSPC subpopulations were characterized. Thus, following electroporation, cells were placed back to culture for a further 48 hours prior to sorting into progenitor and HSC fractions for indel quantification. The level of insertions/deletions at the target site was analyzed by Illumina sequencing (NGS) of the PCR amplified target site at 48 hours after electroporation. Results demonstrate that RNP58 and RNP32 support on-target editing (FIG. 52).

[0489] RNP58 and RNP1 (Table 21) were delivered at concentrations of 2 μM to 8 μM to 25×10⁶ mPB CD34+ cells via MaxCyte electroporation, following 48 hours pre-stimulation in X-Vivo 10 media supplemented with SCF, TPO and FLT3. To investigate the editing in bulk CD34, phenotypic progenitors, and phenotypic hematopoietic stem cells (HSCs), HSPC subpopulations were characterized. Thus, following electroporation, cells were placed back to culture for a further 48 hours prior to sorting into progenitor and HSC fractions for indel quantification. The level of insertions/deletions at the target site was analyzed by Illumina sequencing (NGS) of the PCR amplified target site at 48 hours after electroporation. Results demonstrate that the RNP tested support on-target editing (FIG. 53). A fraction of these cells were also cryopreserved 24 hours post electroporation for further characterized in an in vivo engraftment model (see Example 23).

### Example 23: Infusion of Edited mPB CD34+ Cells into NOD,B6.SCID Il2rγ−/− Kit(W41/W41) Mice Results in Long Term Engraftment and HbF Induction

[0490] To determine whether delivery of RNP34 and RNP33 (Table 21) co-delivered with ssODN OLI16431 (SEQ ID NO:1040, Table 11) achieves edits in long term repopulating hematopoietic stem cells, human adult CD34⁺ cells from mobilized peripheral blood (mPB) were infused into nonirradiated NOD,B6.SCID Il2rγ−/− Kit(W41/W41) (Jackson lab stock name: NOD.Cg-Kit<W-41J>Tyr<+>Prkdc<scid>Il2rg<tm1Wjl>/ThomJ) (“NBSGW”) mice. Briefly, mPB CD34⁺ cells at 62.5×10⁶/mL were electroporated via MaxCyte electroporation with RNP at a dose of 8 μM and 6 μM ssODN OLI16431 following 48 hours pre-stimulation in X-Vivo 10 media supplemented with SCF, TPO and FLT3. After 24 hours, mCD34+ cells were cryopreserved. Five days later, mPB CD34+ cells were thawed and infused into NBSGW mice at 1 million cells per mouse via intravenous tail vein injection. Eight weeks later, mice were euthanized and bone marrow (BM) was collected from femurs, tibias, and pelvic bones. Bone marrow sub-populations of cells respectively identified as CD15+, CD19+, glycophorin A (GlyA, CD235a+), and lineage-negative CD34+ were isolated by FACS, and DNA was extracted to determine the editing levels in each of these fractions. FIG. 54 depicts the frequency of indels, as determined by next generation sequencing, of unfractionated BM, or flow-sorted individual BM sub-populations.

[0491] Next, to determine whether delivery of RNP34 or RNP33 (Table 21) co-delivered with Sp182 RNP (dead gRNA comprising SEQ ID NO:1027 (Table 14) complexed with S. pyogenes Cas9 (SEQ ID NO:1033)) achieves edits in long term repopulating hematopoietic stem cells, human adult CD34+ cells from mobilized peripheral blood (mPB) were infused into nonirradiated NBSGW mice. Briefly, mPB CD34+ cells at 62.5×10⁶/mL were electroporated via MaxCyte electroporation with RNP at varying doses and varying doses of Sp182 RNP following 48 hours pre-stimulation in X-Vivo 10 media supplemented with SCF, TPO and FLT3. After 24 hours, mCD34+ cells were cryopreserved. Five days later, mPB CD34+ cells were thawed and infused into NBSGW mice at 1 million cells per mouse via intravenous tail vein injection. Eight weeks later, mice were euthanized and bone marrow (BM) was collected from femurs, tibias, and pelvic bones. Bone marrow sub-populations of cells respectively identified as CD15+, CD19+, glycophorin A (GlyA, CD235a+), and lineage-negative CD34+ were isolated by FACS, and DNA was extracted to determine the editing levels in each of these fractions. FIG. 55A depicts the frequency of indels, as determined by next generation sequencing, of unfractionated BM, or flow-sorted individual BM sub-populations.

[0492] Lastly, long term HbF induction by BM-derived CD34+ cells was analyzed. An aliquot of BM cells were cultured under erythroid differentiation conditions for 18 days (Giarratana 2011), and evaluated for HbF expression by UPLC. Briefly, unfractionated BM cells extracted from mice 8 weeks after infusion were placed in erythroid culture conditions for 18 days. Cell counts and feeds occurred on days 7, 10 and 14, with erythroid collection at day 18. These bone marrow derived erythroid cells were then counted and lysed in HPLC grade water before filtering to removed cell debris. Then, relative expression levels of gamma-globin chains (over total beta-like globin chains) was measured for each sample by UPLC, with protein separation being achieved by gradually increasing the ratio of acetonitrile with 0.1% trifluoroacetic acid, to water with 0.1% trifluoroacetic acid (FIG. 54B). These data demonstrate that robust long-term HbF induction is achieved by RNP34 and RNP33 co-delivered with Sp182 RNP editing of human CD34+ cells.

[0493] Next, to determine whether delivery of RNP61 or RNP62 (Table 21) co-delivered with ssODN OLI16431 (SEQ ID NO:1040, Table 11) achieves edits in long term repopulating hematopoietic stem cells, human adult CD34+ cells from mPB were infused into nonirradiated NBSGW mice. Briefly, mPB CD34+ cells at 62.5×10⁶/mL were electroporated via MaxCyte electroporation with 8 μM RNP and 8 μM ssODN OLI16431 following 48 hours pre-stimulation in X-Vivo 10 media supplemented with SCF, TPO and FLT3. After 24 hours, mCD34+ cells were cryopreserved. Four days later, mPB CD34+ cells were thawed and infused into NBSGW mice at 1 million cells per mouse via intravenous tail vein injection. Eight weeks later, mice were euthanized and bone marrow (BM) was collected from femurs, tibias, and pelvic bones. Bone marrow sub-populations of cells respectively identified as CD15+, CD19+, glycophorin A (GlyA, CD235a+), and lineage-negative CD34+ were isolated by FACS, and DNA was extracted to determine the editing levels in each of these fractions. FIG. 56A depicts the frequency of indels, as determined by next generation sequencing, of unfractionated BM, or flow-sorted individual BM sub-populations.

[0494] Lastly, long term HbF induction by BM-derived CD235a+(GlyA+) erythroid cells was analyzed. An aliquot of BM cells were cultured under erythroid differentiation conditions for 18 days and evaluated for HbF expression by UPLC. Briefly, unfractionated BM cells extracted from mice 8 weeks after infusion were placed in erythroid culture conditions for 18 days. FIG. 56B depicts the HbF expression, calculated as gamma/beta-like chains (%) by erythroid cells. These data demonstrate that robust long-term HbF induction is achieved by RNP61 and RNP62 co-delivered with ssODN OLI16431 editing of human CD34+ cells.

[0495] Next, to determine whether delivery of RNP1 or RNP58 (Table 21) achieves edits in long term repopulating hematopoietic stem cells, human adult CD34+ cells from mPB were infused into nonirradiated NBSGW mice. Briefly, mPB CD34+ cells at 62.5×10⁶/mL were electroporated via MaxCyte electroporation with 4 μM or 8 μM RNP1 or 2 μM, 4 μM, or 8 μM RNP58 following 48 hours pre-stimulation in X-Vivo 10 media supplemented with SCF, TPO and FLT3. After 24 hours, mCD34+ cells were cryopreserved. Four days later, mPB CD34+ cells were thawed and infused into NBSGW mice at 1 million cells per mouse via intravenous tail vein injection. Eight weeks later, mice were euthanized and bone marrow (BM) was collected from femurs, tibias, and pelvic bones. Human chimerism and lineage reconstitution (CD45+, CD14+, CD19+, glycophorin A (GlyA, CD235a+), lineage, and CD34+, and mouse CD45+ marker expression) in BM was determined by flow cytometry and analyzed (FIG. 57). The frequency of GlyA+ cells was calculated as GlyA+ cells/total cells in BM. Human chimerism was defined as human CD45/(human CD45+mCD45).

[0496] Similar chimerism and lineage distributions were achieved 8-weeks post-transplant by RNP-transfected mPB CD34+ cells compared to mock-transfected mPB CD34+ cells demonstrating that editing is comparable with retaining the engraftment potential of hematopoietic stem cells. FIG. 58 depicts the indels, as determined by next generation sequencing, of unfractionated BM, at 8 weeks post-infusion. FIG. 59 shows the frequency of indel rate in BM, CD15+, CD19+, glycophorin A (GlyA, CD235a+), and lin-CD34+ cells with 2 μM, 4 μM, or 8 μM of RNP58.

[0497] Long term HbF induction by CD235a+(GlyA+) erythroid cells, derived from edited CD34⁺ cells was also analyzed. GlyA+ cells obtained from bone marrow, were isolated by fluorescence Activated Cell Sorting (FACS), collected and lysed in HPLC grade water. Lysates were then evaluated for HbF expression by UPLC. FIG. 60 depicts the HbF expression, calculated as gamma/beta-like chains (%) by GlyA+ cells. These data demonstrate that robust long-term HbF induction is achieved RNP58 editing of human CD34⁺ cells at various RNP58 concentrations.

[0498] Importantly, CD34⁺ cells that were electroporated with varying concentrations of RNP1 or RNP58 maintained their ex vivo hematopoietic activity (i.e., no difference in the quantity or diversity of erythroid and myeloid colonies compared to untreated donor matched CD34⁺ cell negative control), as determined in hematopoietic colony forming cell (CFC) assays (FIG. 61).

### Example 24: NHEJ Mediated Deletions of 4 Nucleotides or Larger at the Distal CCAAT Box Region of HBG Promoter are Maintained Long-Term and Promote Elevated HbF Expression

[0499] Delivery of RNP containing the Cas9 or Cpf1 enzyme targeting the HBG promoter region (FIG. 63A) results in the generation of a multitude of insertions and deletions (indels). These include indels derived from microhomology mediated end joining (MMEJ) and non-homologous end joining (NHEJ) repair mechanisms. As shown below, the MMEJ repair mechanism is not well utilized during editing of the long-term stem cell population (HSC) and this type of edit is lost over time.

[0500] Briefly, mPB CD34+ cells at 62.5×10⁶/mL were electroporated via MaxCyte electroporation with Sp35 RNP following 48 hours pre-stimulation in X-Vivo 10 media supplemented with SCF, TPO and FLT3. Sp35 RNP comprises Sp35 gRNA (comprising the targeting domain of SEQ ID NO:339 (i.e., CUUGUCAAGGCUAUUGGUCA (RNA)); SEQ ID NO:917 (i.e., CTTGTCAAGGCTATTGGTCA (DNA)) complexed with S. pyogenes wildtype (Wt) Cas9 protein. After 24 hours, an aliquot of mPB CD34+ cells was collected for pre-infusion (CD34) indel analysis, another aliquot was placed in erythroid differentiation for indel analysis in the progeny of erythroid progenitors. The rest of the cells were cryopreserved and stored in liquid nitrogen until the initiation of the engraftment study. At the time of infusion, mPB CD34+ cells were thawed and infused into nonirradiated NOD,B6.SCID Il2rγ−/− Kit(W41/W41) (Jackson lab stock name: NOD.Cg-Kit<W-41J>Tyr<+>Prkdc<scid>Il2rg<tm1Wjl>/ThomJ) (“NBSGW”) mice at 1 million cells per mouse via intravenous tail vein injection. Sixteen weeks later, mice were euthanized and bone marrow (BM) was collected from femurs, tibias, and pelvic bones and lineage-negative CD34+ were isolated by FACS, and DNA was extracted from cells collected at pre-infusion, in their erythroid progeny (derived in vitro) and in cells collected at 16 weeks in vivo to determine the indels (insertions/deletions) using the following primers: Forward=CATGGCGTCTGGACTAGGAG (SEQ ID NO:1266) and Reverse=AAACACATTTCACAATCCCTGAAC (SEQ ID NO:1267). The read sequence surrounding every detected deletion was analyzed to identify whether it was likely the result of DSB repair by MMEJ or NHEJ pathways. MMEJ is distinguished from NHEJ by its use of microhomology sequences. MMEJ repair relies on strand resection and annealing of proximally located repeated stretches of nucleotides (microhomologies), surrounding the DSB. The resulting deletion removes one of the microhomology sequences together with the entire intervening sequence between the two microhomologies. Thus, probable MMEJ-mediated deletion can be identified by searching for the presence of a nucleotide sequence at either end of the deleted sequence that is repeated in the region immediately flanking the other end of the deletion. Based on this, deletions were classified as “MMEJ” if stretches of 2 base pairs (bp) or more were detected at the deletion boundary and repeated in the region immediately flanking the other end of the deletion. All other deletions were classified as NHEJ.

[0501] Prior to infusion, ˜30% of indels were derived from MMEJ repair (FIG. 63B, CD34, black striped bar=MMEJ, white bar=NHEJ). In erythroid progenitors (based on indels detected after erythroid differentiation of CD34 cells), MMEJ indels represented -36% of indels (FIG. 63B, Prog, black striped bar=MMEJ, white bar=NHEJ). Following 16 weeks engraftment, the majority of the MMEJ indels were lost (FIG. 63B, HSC, black striped bar=MMEJ, white bar=NHEJ) with the NHEJ derived edits being maintained. This observation has also been observed by others (Bauer 2019, Wu 2019, Weber 2020), and does not appear to be site specific. It was attributed to the transition from a predominant population of actively cycling, and MMEJ-prone short-lived progenitors that constitute most of the CD34+ cells pre-infusion, to the output of more quiescent (and less MMEJ-prone) self-renewing hematopoietic stem cells (HSCs) at later timepoints in vivo. While HSCs provide hematopoietic reconstitution post-engraftment long-term, they represent a very rare population within the CD34+ bulk population pre-infusion. This finding highlights the need to use an editing tool that generates HbF-inducing indels through NHEJ-mediated repair rather than MMEJ repair to achieve durable HbF expression.

[0502] In addition, genotype to phenotype analysis at the distal CCAAT-box region of the HBG1/2 promoters identified mutations leading to most elevated HbF expression. A single cell experiment was performed to evaluate the distribution of gamma chain expression levels in erythroid cells derived from mPB CD34+ cells edited at the distal CCAAT box region. Indels were generated at this site using either Sp35 RNP or RNP34 (Table 21)+Sp182-Cas9-RNP (FIG. 27F, Table 14). Briefly, mPB CD34+ cells at 6.25×10⁶/mL (100 μl) were electroporated via MaxCyte electroporation with 4 μM Sp35 RNP or 8 μM HBG1-1-AsCpf1H800A-RNP co-delivered with 8 μM Sp182-Cas9-RNP (all RNPs at a molar ratio of 4:1 gRNA:RNA guided nuclease) following 48 hours pre-stimulation in X-Vivo 10 media supplemented with SCF, TPO and FLT3. Sp35 RNP comprises Sp35 gRNA (comprising the targeting domain of SEQ ID NO:339 (i.e., CUUGUCAAGGCUAUUGGUCA (RNA)); SEQ ID NO:917 (i.e., CTTGTCAAGGCTATTGGTCA (DNA)) complexed with S. pyogenes wildtype (Wt) Cas9 protein. RNP34 comprises HBG1-1-AsCpf1H800A-RNP (composed of His-AsCpf1-sNLS-sNLS-H800A (SEQ ID NO:1032) complexed to HBG1-1 gRNA with a 3′ modification as shown in Table 14 (SEQ ID NO:1041)). After being left to recover for 48 hours post-electroporation, the cells were sorted by Fluorescence Activated Cell Sorting (FACS) at 1-cell/well in non-tissue culture treated 384-well plates. The cells were then differentiated and expanded clonally for 18 days into the erythroid lineage (adapted from Giarratana 2011). UPLC analysis was performed to determine the distribution of G-gamma chain expression levels (percentage of G-gamma/[total beta-like chains]) in the clonal erythroid progeny of cells derived from the total population of mPB-CD34+ cells initially edited. Sequencing analysis (allele identification and detection of indels using the following primers: Forward=CATGGCGTCTGGACTAGGAG (SEQ ID NO:1266) and Reverse=AAACACATTTCACAATCCCTGAAC (SEQ ID NO:1267)) and ddPCR (loss of 4.9 kb fragment deleting g-Gamma coding sequence) was performed on gDNA from an aliquot of each clonal culture collected on day 14, prior to enucleation, and enabled identification of clones containing only one allele coding for G-gamma, in association with a specific indel. Indels disrupting more than 3 nucleotides were generally associated with more elevated HbF expression compared to smaller indels (FIG. 63C). This finding highlights that using an editing tool that generates larger deletions at the distal CCAAT box region will provide more elevated levels of HbF expression, likely by more effectively disrupting the binding at this site of regulatory factors repressing HBG expression. Notably, most of the larger deletions evaluated were detected in clones derived from the CD34 cells edited with the Cpf1 RNP, while most of the smaller deletions evaluated were detected from clones derived from the CD34 cells edited with the Cas9 RNP (FIG. 63D), suggesting that larger indels occur more frequently with the Cpf1, leading to a potentially higher fraction of cells with elevated HbF in the erythroid progeny of CD34 cells edited with Cpf1 compared to Cas9. Consistent with this result, distribution of gamma chain expression levels (percentage of gamma chains/[total beta-like chains]) in the clonal erythroid progeny of cells derived from the total population of mPB-CD34+ cells initially edited by either the Cpf1 or Cas9 RNP showed a higher frequency of cells with high HbF in the Cpf1 sample compared to the spCas9 sample (FIG. 63E). Of the clones analyzed derived from the CD34+ cells edited with the Cpf1 RNP, 83.1% had gamma chains levels above the median level detected in erythroid clones derived from mock electroporated mPB CD34+ cells (median value=18.8%), 64.2% had gamma chains levels exceeding 30% of total beta-like and 35.8% had gamma chains levels exceeding 48.8% of total beta-like (30%+18.8% median level in control cells). Of the clones analyzed derived from the CD34+ cells edited with the Cas9 RNP, 71.4% had gamma chains levels above the median level detected in erythroid clones derived from mock electroporated mPB CD34+ cells (median value=18.8%), 49.5% had gamma chains levels exceeding 30% of total beta-like and 23.1% had gamma chains levels exceeding 48.8% of total beta-like (30%+18.8% median level in control cells).

### Example 25: Cpf1 RNP Targeting the Distal CCAAT Box Region of the HBG Promoter is Efficient at Generating Durable NHEJ Mediated Deletions of 4 Nucleotides or Larger

[0503] RNP, consisting of guide RNA targeting the distal CCAAT box region of the HBG promoter complexed with either Cpf1 or Cas9 enzyme was electroporated into mobilized peripheral blood (mPB) derived CD34+ cells using the MaxCyte GT (MaxCyte, Inc.) electroporation device. Briefly, mPB CD34+ cells at 62.5×10⁶/mL were electroporated with 4 μM Sp35 RNP (at a molar ratio of 2:1 gRNA:RNA-guided nuclease) or 8 μM RNP58 (Table 21) (at a molar ratio of 4:1 gRNA:RNA-guided nuclease) following 48 hours pre-stimulation in X-Vivo 10 media supplemented with SCF, TPO and FLT3. Sp35 RNP comprises Sp35 gRNA (comprising the targeting domain of SEQ ID NO:339 (i.e., CUUGUCAAGGCUAUUGGUCA) (RNA)); SEQ ID NO:917 (i.e., CTTGTCAAGGCTATTGGTCA) (DNA)) complexed with S. pyogenes wildtype (Wt) Cas9 protein.

[0504] The level and profile of insertions/deletions at the target site was analyzed 24 hours after electroporation. The fraction of small indels present in the samples was assessed by Illumina amplicon sequencing (ILL-seq), following library preparation method and analysis. A 15 bp window around the expected cut site was used in the analysis to calculate editing rates. The oligonucleotides and amplicon used to generate the targeted amplicon sequencing products are provided in FIG. 77A and FIG. 77B.

[0505] To characterize editing by RNP32, the indels generated in each sample were analyzed and processed. The results were summarized by looking at 1) percentage deletion for each base within the target region, 2) distribution of insertion and deletion center positions, and 3) distribution of insertion and deletion lengths. To perform these analyses, the cigar strings for the reads in the alignment bam files were processed, using the following steps:
[0506] 1) Group indels appearing in the same read.
[0507] 2) Create indel_id for indels from each read. Indel_id is a string identifying the indel, shown as indel_start_position+_+indel_length+_+ID. Where ID is NA for deletions and for insertions is the sequence inserted. See example in FIG. 77D.
[0508] 3) Group reads with the same indel_id.
[0509] 4) Count number of reads with the same indels and calculate their total fractions (including wt) and fractions in indels (excluding wt). Fractions in indels allow for a comparison between samples when they have different amounts of total editing.

[0510] Deletions were classified as “MMEJ” if stretches of 2 base pairs or more were deletion boundary and repeated in the region immediately flanking the other end of the deletion. All other deletions were classified as NHEJ. Table 31 shows the indels detected in the samples edited by RNP58 or Sp35 RNP.

[0511] Delivery of RNP containing the Cas9 or Cpf1 enzyme targeting the HBG promoter region (FIG. 63A) results in the generation of a multitude of insertions and deletions (indels). Different enzymes have different mechanistic properties; including relative to their engagement with the DNA target site and their cleavage activity, and leave different DNA ends that impact the repair outcome (Sternberg 2014, Strohkendl 2018, Swarts 2018). Notably, Cpf1 editing results in a four nucleotide 5′ overhang, which is quite different from the blunt ends of SpCas9 edits (see FIG. 63A).

[0512] Evaluation of the editing profile mediated by a Cpf1 and Cas9 RNP targeting the distal box (RNP58 and Sp35RNP, respectfully) showed that indels generated by both enzymes were generally centered at the distal CCAAT box region (FIG. 64H), and the most commonly deleted base was at position TSS:-113 for both RNPs (FIGS. 64E and 64F). However, evaluation of individual indels, as defined by their position relative the HBG-TSS, length, and sequence in the case of insertions, demonstrates differences in the editing outcome after editing this site with the SpCas9 or Cpf1 RNP. FIGS. 64C and 64D show the top 20 indels generated by the Cpf1 and Cas9 RNP, respectively. The most abundant indel generated by Cas9 was the MMEJ-meditated 13 bp deletion 157_-13_NA (HBG1/2 c.-102 to -114, Table 31), more commonly known as the 13 bp HPFH deletion, detected at 31.88% in the Cas9 sample compared to 3.36% in the Cpf1 sample (FIGS. 64D and 64C, respectively). The most abundant indel generated by Cpf1, was the MMEJ mediated 18 nt deletion 159_-18_NA (HBG1/2 c.-104 to -121, Table 31), which was detected at 18.53% in the Cpf1 sample compared to 1.35% in the Cas9 sample (FIGS. 64C and 64D, respectively). The five most common NHEJ indels detected in each sample were deletions of 3 to 7 bp in length for the Cpf1 sample and were deletions of 1 to 4 bp and a 1 bp insertion for Cas9 (FIGS. 64C and 64D, respectively). The full list of indels detected at >0.1% in any of the two samples is shown in Table 31.

[0513] While most indels detected at >0.1% in any of the two samples were also detected in the other sample (above or below 0.1%), their relative frequencies amongst all indels were different depending on the enzyme (Table 31 and FIG. 64I). Notably, insertions were detected at 14.09% in the Cas9 (Sp35 RNP) sample but were rarely detected in the Cpf1 (RNP58) sample (0.47%). Also, larger indels were enriched in CD34 cells edited with the Cpf1 RNP (RNP58) compared to the Cas9 RNP (Sp35 RNP) (FIG. 64J). FIG. 64G shows the distribution of indel length generated by each RNP, and FIG. 64A shows the distribution of indel length generated by each RNP for indels categorized as NHEJ-mediated. Most indels generated by Cpf1 were larger than 3 bp (FIG. 64G), which was shown to be associated with more elevated HbF in erythroid cells (FIG. 63C). Cas9 also generated deletions larger than 3 bp, however, those were primarily generated via the MMEJ repair pathway, which are expected to be less frequently observed in vivo after infusion, as this repair pathway is poorly utilized by the rare population of HSC within the CD34+ cells. NHEJ is the major repair pathway utilized by HSC (FIG. 63B), thus evaluation of the NHEJ-mediated indel profile provides information on the type of indels that are expected to be maintained in vivo at long-term after infusion of CD34+ cells.

[0514] When compared to Cas9 RNP (Sp35 RNP), the Cpf1 RNP (RNP58) showed a shift to larger NHEJ mediated indels (FIG. 64A), with the most commonly observed NHEJ indel length being 1 bp for Cas9 compared to 5 bp for Cpf1, indicating a more favorable CD34+ cells editing profile by Cpf1 for both robust and durable induction of HbF.

[0515] The percentage of >3 bp NHEJ mediated indels, >3 bp MMEJ mediated indels, and <3 bp indels at the distal CCAAT box resulting from editing by RNP58 (Cpf1) or Sp35 RNP (Cas9) is shown in FIG. 64B (indels generated by SpCas9 (left pie chart): NHEJ >3 bp=21.42%; <3 bp=48.84%; MMEJ >3 bp=29.74%; indels generated by RNP58 (right pie chart): NHEJ >3 bp=64.86%; <3 bp=11.11%; MMEJ >3 bp=24.02%). Cas9 (Sp35 RNP)-edited cells comprised a large fraction of small indels less than 3 bp in length, and indels>3 bp in length (associated with highest levels of HbF) were largely mediated by the MMEJ pathway (FIG. 64B). Instead, close to 90% of indels mediated by Cpf1 (RNP58) were >3 bp in length, approximately two third of those mediated by NHEJ (FIG. 64B), suggesting that the high fraction of indels >3 bp in length is expected to be maintained at long term in vivo, and the ratio of MMEJ-mediated indels is reduced in favor of NHEJ-mediated indels (FIG. 63B). Taken together, this highlights that the most durable NHEJ mediated indels are productive (>3 bp) with RNP58, whereas Sp35 RNP produces a much lower fraction of productive indels, many of which are not durable (MMEJ meditated). This demonstrates that RNP58 is an advantageous editing tool that generates HbF-inducing indels through NHEJ-mediated repair rather than solely via MMEJ repair to achieve durable HbF expression.

### Example 26: Infusion of RNP32 Edited mPB CD34+ Cells into NOD,B6.SCID Il2rγ−/− Kit (W41/W41) Mice Results in Long Term Engraftment, Indel Maintenance, and High HbF Induction

[0516] To determine whether RNP32 achieves edits in long term repopulating hematopoietic stem cells, human adult CD34+ cells from mobilized peripheral blood (mPB) were infused into nonirradiated NOD,B6.SCID Il2rγ−/− Kit(W41/W41) (Jackson lab stock name: NOD.Cg-Kit<W-41J>Tyr<+>Prkdc<scid>Il2rg<tm1Wjl>/ThomJ) (“NBSGW”) mice. Briefly, mPB CD34+ cells at 62.5×10⁶/mL were electroporated via MaxCyte electroporation with 6 μM RNP32 (Table 21) (at a molar ratio of 2:1 gRNA:RNA guided nuclease) or buffer only (“Mock”) following 48 hours pre-stimulation in X-Vivo 10 media supplemented with SCF, TPO and FLT3. After a further 24 hours, mCD34+ cells were cryopreserved. A portion of the cells was placed in in vitro culture for up to 72h post-electroporation and gDNA collected every day for indel analysis. On the day of infusion, mPB CD34+ cells were thawed and infused into NBSGW mice at 1 million cells per mouse via intravenous tail vein injection. Sixteen weeks later, mice were euthanized and bone marrow (BM) was collected from femurs, tibias, and pelvic bones.

[0517] Genomic DNA was isolated from both the pre-infused CD34⁺ cells (24-72 hours post electroporation) and from the bone marrow following 16 weeks engraftment. At 24 hours post electroporation, approximately 92% indels were achieved, as measured by Illumina sequencing of the on-target PCR product using the following primers: Forward=CATGGCGTCTGGACTAGGAG (SEQ ID NO:1266) and Reverse=AAACACATTTCACAATCCCTGAAC (SEQ ID NO:1267).

[0518] Analysis of the indel length distribution and classification of indels of length <3 bp, and of indels of length >3 bp either categorized as MMEJ or NHEJ mediated indels, was conducted on the preinfusion cell population after 24h to 72h of in vitro culture post-electroporation. Deletions were classified as “MMEJ” if stretches of 2 base pairs (bp) or more were detected at the deletion boundary and repeated in the region immediately flanking the other end of the deletion. All other deletions were classified as NHEJ.

[0519] The distribution of indel length, shown in FIGS. 65H-K, and for NHEJ-indels only in FIGS. 65D-G), was very similar across all timepoints (FIGS. 65D and 65K). Insertions were rarely detected, and the most commonly observed deletion size was -18, which notably corresponds to the size of the 18 bp MMEJ deletion HBG1/2 c.-104 to -121 and is the most frequent repair outcome after editing this site with Cpf1 (FIGS. 64C, 79, Table 32). The most commonly observed deletion size amongst NHEJ indels was 5 bp as shown in FIGS. 65D-G.

[0520] At all timepoints, indels of size larger than 3 bp, which were observed to be associated with the highest levels of HbF induction (FIG. 63C), represented close to 90% of all indels (FIG. 65A-C). About two thirds of those were mediated by NHEJ, suggesting that the high fraction of indels >3 bp length is expected to be maintained at long term in vivo, where the ratio of MMEJ-mediated indels is reduced in favor of NHEJ-mediated indels (FIG. 63B).

[0521] Following 16 weeks engraftment, ˜96% indels were measured demonstrating indel maintenance within the long term repopulating CD34+ cells (FIG. 65A).

[0522] Next, sub-populations of cells within the bone marrow were identified via FACS analysis to determine levels of multilineage engraftment. Human chimerism and lineage reconstitution (CD45+, CD15+, CD19+, glycophorin A (GlyA, CD235a+), lineage, and CD34+, and mouse CD45+ marker expression) in BM was determined by flow cytometry and analyzed. The frequency of GlyA+ cells was calculated as GlyA+ cells/total cells in BM. Human chimerism was defined as human CD45/(human CD45+mCD45). Analysis revealed a high level of human chimerism, with no difference compared to mock electroporated cells. Greater than 90% human chimerism was achieved in both the mock and RNP32 edited groups of mice (FIG. 65M). In addition, comparable reconstitution of the B-cell, neutrophil, erythroid, and CD34+ cell lineages was observed in mice infused with RNP32 or Mock electroporated cells (FIG. 65M).

[0523] Long term HbF induction by CD235a+(GlyA+) erythroid cells, derived from RNP32 edited CD34+ cells was also analyzed. GlyA+ cells obtained from bone marrow were stained for gamma globin expression and analyzed via flow cytometry. The edited cells demonstrated pancellular distribution with ˜90% of cells being F positive (FIG. 65N). In addition, the GlyA+ cell population was isolated by Fluorescence Activated Cell Sorting (FACS), collected and lysed in HPLC grade water. Lysates were then evaluated for HbF expression by UPLC. FIG. 65O depicts the HbF expression within the GlyA+ population, which exceeded 50%, calculated as gamma/beta-like chains (%) by GlyA+ cells.

[0524] These data demonstrate that robust long-term HbF induction is achieved with RNP32 editing of human CD34+ cells. In addition, RNP32 editing does not negatively impact the engraftment and lineage reconstitution capacity of CD34+ cells.

### Example 27: Infusion of RNP32 Edited mPB CD34+ Cells into NSG (NOD-SCID Il2rγ^{Null}) Mice Demonstrates a Highly Polyclonal and Stable Engraftment of Edited Cells Over 20 Weeks with No Clonal Outgrowth

[0525] To determine whether indels derived from RNP32 (Table 21) maintain a polyclonal profile longitudinally, human adult CD34+ cells from mobilized peripheral blood (mPB) were infused into nonirradiated NSG (NOD-SCID Il2rγ^{Null}) (Jackson lab stock name: NOD.Cg-Prkdc^{scid}Il2rg^{tmlWjl}/SzJ (“NSG”) mice. Briefly, mPB CD34+ cells at 62.5×10⁶/mL were electroporated via MaxCyte electroporation with 6 μM RNP32 or buffer only (“Mock”) following 48 hours pre-stimulation in X-Vivo 10 media supplemented with SCF, TPO and FLT3. After a further 24 hours, mCD34+ cells were cryopreserved. On the day of infusion, mPB CD34+ cells were thawed and infused into busulfan treated NSG mice at 5 million cells per mouse via intravenous tail vein injection. Blood was collected from mice via tail snips at 8, 12, 16, and 20 weeks post infusion and gDNA was isolated. Indel profile analysis was performed on these samples, along with the pre-infusion CD34+ cell product (24 hours post electroporation) to track maintenance of polyclonality. The following primers were used to detect indels: Forward=CATGGCGTCTGGACTAGGAG (SEQ ID NO:1266) and Reverse=AAACACATTTCACAATCCCTGAAC (SEQ ID NO:1267). No notable clonal outgrowth occurred in any of the mice analyzed demonstrating maintenance of a diverse indel profile over a 20 week period (FIG. 66A). In addition, at 20 weeks post engraftment, mice were euthanized and bone marrow (BM) was collected from femurs and tibias. Genomic DNA was isolated and indel profile analysis was performed using the primers described above. As seen in the peripheral blood, a diverse array of indels was observed (FIG. 66B). This demonstrates that hematopoiesis was reconstituted by a large number of edited hematopoietic stem cells, indicating that the RNP mediated gene modification did not impair the capacity of HSC within the edited CD34 cell population to engraft and self renew in vivo. In addition, no clonal outgrowth was observed suggesting that no cells with uncontrolled proliferation of tumorigenic potential was generated following the modification of the CD34 cells by the RNP. Emergence of a dominant clone would be a potential indication of uncontrolled proliferation or tumorigenesis, which is not seen with RNP32 editing.

### Example 28: Use of RNP for the Treatment of Sickle-Cell Disease

[0526] As described herein, an autologous cell therapy for sickle cell disease (SCD) can be developed that comprises CD34+ cells from patients with SCD that are edited with a AsCas12a RNP at the HBG1 and HBG2 promoters to induce the expression of anti-sickling fetal hemoglobin. This autologous cell therapy is a therapeutic approach to SCD to promote the expression of anti-sickling fetal hemoglobin by directly targeting the promoter of the HBG1 and HBG2 genes which encode for the fetal gamma globin chains (FIG. 67).

[0527] The efficiency of RNP32 editing for such a cell therapy was determined using CD34+ cells obtained from three independent normal adult donors and four SCD patient donors and compared. Seven batches of mobilized peripheral blood CD34+ cells were used in two independent experiments (Table).

TABLE 26
CD34+ cell batches

| | | Donor Mobilization |
|---|---|---|
| Cell Batch ID | Donor Type | Regimen |
| CEL021-014 | Normal | G-CSF and plerixafor |
| CEL042-001 | Normal | G-CSF |
| CEL238-001 | Normal | G-CSF and plerixafor |
| CEL211-001 | SCD | Plerixafor |
| CEL239-001 | SCD | Plerixafor |
| CEL240-001 | SCD | Plerixafor |
| CEL241-001 | SCD | Plerixafor |

Normal donor type cells were obtained as leukopaks from Hemacare and enriched using the CliniMACS Plus system. SCD CD34+ cells were shipped frozen on dry ice from NIH and University of California, San Francisco. All vials were stored in liquid nitrogen vapor phase until ready for experiments.

[0528] Briefly, CD34+ cells from normal or SCD donors were pre-stimulated in media consisting of X-Vivo 10, supplemented with 1× Glutamax, 100 ng/mL stem cell factor (SCF), 100 ng/mL thrombopoietin (TPO), and 100 ng/mL FMS-like tyrosine kinase 3 ligand (Flt3L) for 2 days in a humidified incubator at 37° C., 5% carbon dioxide (CO2). After 2 days of culture, cells were collected and resuspended in MaxCyte electroporation buffer. RNP32 (6 μM, at a gRNA/protein molar ratio of 2) was delivered to CD34+ cells via a MaxCyte GT electroporation device. 1×10⁶ to 6.25×10⁶ cells can be used per OC-100 cartridge for electroporation. However, due to the limited number of cells available from SCD donors, 0.4×10⁶ to 1×10⁶ cells from each batch were used for electroporation (FIG. 68B). Pre-warmed complete media was then added to the cells to give a final cell density of approximately 1×10⁶ cells/mL (assuming approximately 10% cell loss during processing). The electroporated cells, along with untreated control cells (cells that did not undergo electroporation), were then placed in a humidified incubator at 37° C., 5% CO₂. At Days 1, 2, and 3 post-electroporation, an aliquot of cells was counted to determine viability and cells were harvested for further analyses.

[0529] Comparable viabilities were obtained between normal and SCD CD34+ cells treated with RNP32 at Days 1 to 3 post-electroporation (FIG. 68A, FIG. 68B). The two samples with the lowest viability (one SCD and one normal donor CD34+ cells) coincided with low cell numbers used at electroporation (FIG. 68B).

[0530] Electroporated CD34+ cells were resuspended in Quick Extract at a concentration of 2,000 to 4,000 cells/μL. Crude genomic deoxyribonucleic acid (gDNA) extraction was conducted by subjecting the lysate to the following conditions in a thermocycler: 15 min at 65° C. followed by 10 min at 95° C. Crude gDNA was then analyzed for indels by next generation sequencing using the following primers: Forward=CATGGCGTCTGGACTAGGAG (SEQ ID NO:1266) and Reverse=AAACACATTTCACAATCCCTGAAC (SEQ ID NO:1267). RNP32 edited normal donor CD34+ cells as efficiently as SCD CD34+ cells (FIG. 69A, FIG. 69C). The indel levels were variable at Day 1 post electroporation (normal, 40.07% to 84.39%; SCD, 46.78% to 79.50%) but increased to approximately 90% by Day 3 post electroporation in both normal (83.13% to 97.17%) and SCD CD34+ cells (83.04% to 95.78%) (FIG. 69C, FIG. 69B (Day 3)). The variable levels of editing observed at Day 1 was likely related to the low number of cells used in this experiment, which was limited by the availability of cells from SCD donors as described above.

[0531] RNP32 recognizes both HBG1 and HBG2 promoters. Cleavage at both sites can lead to the deletion of the 4.9 kb intervening sequence. To assess the frequency of the 4.9 kb deletion, two ddPCR assays were designed, on-target amplicon and reference amplicon (FIG. 70A). The relative positions of the primers and probes are shown in FIG. 70A and the sequences are provided in FIG. 70B. For each sample, approximately 1.1 ng of gRNA was added to a droplet generator (BioRad) in a PCR plate and droplets were generated following manufacturers instruction. The plate was then moved to the thermocycler and the following protocol was run: 1 cycle of 10 min at 98° C., 40 cycles of 30 seconds at 94° C. and 2 min at 94° C., followed by 1 cycle of 10 min at 98° C. and hold at 4° C. Afterward, the plate was moved to the droplet reader (BioRad) for quantification and counting of droplets that are; a) Negative, b) Positive for both the on-target amplicon and reference amplicon, c) Positive for on-target only, d) Positive for reference only. To determine the percentage of 4.9 kb deletions, the following equation was applied to each sample.

$$\% 4.9 kb deletion = \frac{conc . reference - \frac{conc . on target}{Reference correction factor *}}{conc . reference} \times 100$$

[0532] *Reference correction factor was calculated as an average of [(on target concentration)/(reference concentration)] of the control samples.

[0533] The on-target editing by RNP32 also resulted in the deletion of the 4.9 kb fragment between the HBG1 and HBG2 promoters, which occurred at a frequency of approximately 27% of the beta globin loci in both normal (16.4% to 38.5%) and SCD CD34+ cells (20.7% to 32.4%) at Day 1 post-electroporation (FIG. 71A, FIG. 71B).

[0534] Erythroid progeny of normal and SCD CD34+ cells were also characterized and the ability of RNP32-edited CD34+ cells to differentiate into erythroid cells was determined. Briefly, at Day 1 post-electroporation (described above), 120,000 cells were cultured in erythroid-inducing media to generate erythroid cells using a modified three-step differentiation protocol developed by Giarratana and colleagues (Giarratana, 2005). CD34+ cells were cultured for 7 days in Step-1 media consisting of Iscove's modified Dulbecco's medium (IMDM) supplemented with 1× GlutaMAX (Gibco), 100 U/mL penicillin, 100 mg/mL streptomycin, 5% human AB+ plasma, 330 μg/mL human holo transferrin, 20 mg/mL human insulin, 2 U/mL heparin, 1 μM hydrocortisone, 3 U/mL recombinant human erythropoietin (EPO), 100 ng/mL SCF, and 5 ng/mL interleukin (IL)-3. On Day 7, cells were transferred to Step-2 media, which was identical to Step-1 media except the absence of hydrocortisone and IL-3 and cultured for 4 days. Next, cells were cultured for 7 days in Step-3 media, which was similar to Step-2 media but without the addition of SCF, and 5% human AB+ plasma was replaced with 5% KnockOut Serum Replacement (Gibco). At the end of the 18-day culture, 10 μL of cells were stained with 90 μL of erythroid fluorescence activated cell sorting (FACS) master mix for 15 min at 4° C. and acquired on a Guava easyCyte 12HT flow cytometer to determine enucleation frequency. Up to 120 mL cell suspension per sample was spun down at 500× g for 5 min to reduce the total volume of each sample down to 20 mL. Cell suspension was then passed through Acrodisc WBC syringe filters to remove nucleated cells and the resultant RBCs were used for further analyses in the experiments set forth in this example.

[0535] When placed under erythroid-inducing conditions, normal and SCD CD34+ cells (RNP32-edited cells and unedited cells), underwent robust expansion, averaging 23,000 fold across all experimental groups in 18 days (FIGS. 72A, Table 27). By Day 18, the culture consisted of erythroblasts, RBCs, and extruded nuclei (pyrenocytes) (data not shown). Approximately 80% of the erythroid cells across all groups reached terminal maturation and lost their nucleus (FIG. 72B). In summary, comparable fold expansion and terminal maturation were achieved by normal and SCD CD34+ cells with or without RNP32 electroporation.

TABLE 27
Phenotype characterization of erythroid progeny of CD34+ cells

| | | | | | | | HbF + |
|---|---|---|---|---|---|---|---|
| Experiment | | Donor | | Fold | Enucleation | HbF | cells |
| ID | Donor Lot | Type | Treatment | Expansion | (%) | (%) | (%) |
| SCD011 | CEL211-001 | SCD | untreated | 12465 | 77.42 | 16.54 | |
| | | | RNP32 | 15118 | 75.61 | 48.63 | |
| | CEL238-001 | Normal | untreated | 25814 | 83.62 | 17.97 | |
| | | | RNP32 | 16674 | 81.77 | 39.24 | |
| SCD014 | CEL240-001 | SCD | untreated | 11686 | 80.57 | 25.84 | 71.27 |
| | | | RNP32 | 12856 | 78.30 | 58.99 | 94.50 |
| | CEL241-001 | SCD | untreated | 16793 | 83.21 | 17.26 | 58.65 |
| | | | RNP32 | 16937 | 84.72 | 53.70 | 93.45 |
| | CEL239-001 | SCD | untreated | 19732 | 76.43 | 18.25 | 50.09 |
| | | | RNP32 | 20540 | 76.79 | 51.03 | 93.29 |
| | CEL211-001 | SCD | untreated | 27390 | 80.06 | 27.92 | 64.51 |
| | | | RNP32 | 35845 | 81.21 | 58.71 | 93.79 |
| | CEL238-001 | normal | untreated | 16214 | 78.15 | 16.36 | 58.23 |
| | | | RNP32 | 29239 | 81.70 | 51.60 | 92.92 |
| | CEL021-014 | normal | untreated | 21498 | 87.12 | 11.08 | 37.76 |
| | | | RNP32 | 27659 | 86.71 | 38.38 | 90.61 |
| | CEL042-001 | normal | untreated | 26615 | 69.14 | 10.49 | 45.00 |
| | | | RNP32 | 53774 | 80.08 | 43.83 | 93.85 |

The enucleation rate was calculated as proportion of NucRed-cells (RBC) within CD235+ (erythroid) population.

[0536] HbF induction in the erythroid progeny of normal and SCD CD34+ cells post-editing by RNP32 was also characterized and a globin chain analysis was performed. Expression of various hemoglobin subunits was analyzed using reverse phase ultra-performance liquid chromatography (RP-UPLC) modified from a method described by Masala and Manca 1994). 1×10⁶ cells post filtration from erythroid differentiation described above were washed once with phosphate buffered saline (PBS)-0.5% bovine serum albumin (BSA), and then lysed in 50 μL liquid chromatography-mass spectrometry (LC-MS) grade water. Samples were loaded onto the Agilent 1290 UPLC system. Elution was followed at 220 nm with no reference wavelength. The globin chains were eluted in the following order: β, α, AγT (a common Aγ variant, gene product of HBG1), Gγ (gene product of HBG2), and Aγ (gene product of HBG1). Area under the curve under each peak approximated the relative abundance of each globin chain and was used to calculate the level of HbF. As HbA is composed of α2β2 and HbF is composed of α2γ2, the level of HbF expression was calculated as (Aγ+Gγ)/(Aγ+Gγ+β) (%), or (AγT+Aγ+Gγ)/(AγT+Aγ+Gγ+β) (%), labelled as γ/β-like (%).

[0537] The frequency of HbF+ cells (HbF-expressing cells) in RBCs following filtration was determined using a method described by Thorpe (Thorpe 1994). In brief, the RBCs from the erythroid differentiation described above were fixed with 4% formaldehyde, permeabilized with ice-cold acetone, washed with PBS-0.5% BSA, and stained with HbF+ cell FACS master mix. Cells were washed with PBS-0.5% BSA, resuspended in PBS 0.5% with NucRed (2 drops/mL) and acquired on the Guava flow cytometer.

[0538] Erythroid cells derived from normal and SCD CD34+ cells electroporated with RNP32 demonstrated elevated, and pancellular HbF expression. An average of 43.26% HbF was measured in the treated normal donor group (38.38% to 51.60%), and 54.21% HbF in the treated SCD donor group (48.63% to 58.99%), significantly increased from a background of 13.98% (10.49% to 17.97%) and 21.16% (16.54% to 27.92%) in the untreated normal donor group and SCD donor group, respectively (FIG. 73A, Table 27). In addition, on average >92% of RBCs derived from RNP32-electroporated CD34+ cells of either donor type (normal or SCD donors) were HbF+(normal, 90.61% to 93.85%; SCD, 93.29% to 94.50%) (FIG. 73B, Table 27), which was significantly elevated compared to RBCs derived from respective untreated CD34+ cells (normal, 37.76% to 58.23%; SCD, 50.09% to 71.27%). Thus, high RNP32 editing levels resulted in elevated HbF levels after in vitro erythroid differentiation, with over 50% of HbF measured in RNP32-derived red blood cells (FIG. 73C).

[0539] Several assays were conducted to demonstrate the clinical relevance of the elevated fetal hemoglobin in untreated sickle cell patient cells, and to a lesser extent the untreated cells from normal donors, as shown in FIG. 73B. Due to the in vitro culture used to differentiate the CD34+ cells into RBCs to conduct those assays, there is a high background of HbF in untreated cells derived from SCD patients. This is expected with these culture conditions, and has been previously reported by M6tais et al. (M6tais 2019). This likely partially masks the full extent of the benefit achieved in modified cells when compared to unmodified cells.

[0540] To evaluate the impact of HbF induction on the sickling of RBCs as a result of hypoxia-induced HbS polymerization, untreated RBCs derived from unedited SCD CD34+ cells (unedited control cells) and RBCs derived from edited SCD CD34+ cells were incubated with oxygen scavenger sodium metabisulfite solution to remove oxygen from the cell suspension, thereby placing the cells under extremely reduced oxygen tension. The percentage of sickled RBCs derived from unedited SCD CD34+ cells and sickled RBCs derived from RNP-32 edited SCD CD34+ cells was then determined and compared.

[0541] Briefly, cells were first induced to generate erythroid cells. One million RNP32-edited RBCs were collected from the erythroid differentiation assay as described above and washed with PBS-0.5% BSA. The cell pellet was then resuspended in 20 μL PBS and mixed with 20 μL of 2% sodium metabisulfite weight/volume in water. One drop (approximately 20 μL) of this cell mix was then placed on a microscopic slide, covered with a coverslip and the edges were sealed. Slides were stored at room temperature for 1 to 4 hours before imaging and analyzing for morphological changes. Average sickling frequency reduced from 38.3% in untreated SCD RBCs (having a mean HbF of 19.9%) to 10.6% in RNP32-edited SCD RBCs (having a mean HbF of 53.8%), representing an approximate 4-fold decrease in sickling morphology for RNP32-edited RBCs from SCD patients compared with unedited RBCs from SCD patients (FIG. 74). Sodium meta-bisulfite leads to extreme hypoxia, below levels commonly observed physiologically, thus even lower percentage of sickling RBC is expected in vivo from the edited cells.

[0542] The deformability of SCD RBCs was also evaluated. To evaluate whether HbF induction decreases the rigidity and improves the deformability of SCD RBCs when deoxygenated, untreated RBCs from patients with SCD and RNP32-edited RBCs from SCD patients were analyzed on a Lorrca ektacytometer where shear stress was applied under decreasing oxygen tension (FIG. 75A). Fifteen million RBCs following filtration from erythroid differentiation (as described above) were collected and washed with PBS-0.5% BSA. Cells were centrifuged at 500×g for 5 minutes, resuspended in 1.5 ml of OXY ISO solution (Lorrca), and mixed gently by inversion. Cell suspension was then loaded onto the Lorrca ektacytometer where Oxygenscan was performed per manufacturer's instructions to measure the deformability of RBCs under shear stress when deoxygenated. RBC deformability was expressed as elongation index (EI) (FIG. 75A) and “point of sickling” represented the relative oxygen pressure when the SCD RBCs started to sickle and lost >5% of the EI during deoxygenation. Normal RBCs containing healthy adult hemoglobin (HbA and HbF) from three different donors were not impacted by the reduction in oxygen tension (FIG. 75B). In contrast, SCD RBCs from four donors became rigid when deoxygenated, as illustrated by the gradual decrease in elongation index corresponding with oxygen depletion (FIG. 75C (black line)). SCD RBCs derived from RNP32-edited CD34+ cells started to sickle at lower oxygen tension (represented as the point of sickling) compared to RBCs from untreated CD34+ cells (FIG. 75C (grey line), 75D, Table 28). In addition, deoxygenated RNP32-treated SCD RBCs remained more flexible than untreated SCD RBCs as demonstrated by the higher minimum elongation index observed for RNP32-treated SCD RBCs relative to untreated SCD RBCs (FIG. 75E, Table 28).

TABLE 28
Summary of deformability assessment of RBCs

| | | | | Point of | Minimum |
|---|---|---|---|---|---|
| Experiment | | Donor | | Sickling | Elongation |
| ID | Donor Lot | Type | Treatment | (pO2, mmHg) | Index |
| SCD011 | CEL211-001 | SCD | untreated | 60.17 | 0.085 |
| | | | RNP32 | 35.11 | 0.260 |
| SCD014 | CEL240-001 | SCD | untreated | 38.55 | 0.187 |
| | | | RNP32 | 21.80 | 0.340 |
| | CEL241-001 | SCD | untreated | 31.18 | 0.292 |
| | | | RNP32 | 11.80 | 0.399 |
| | CEL239-001 | SCD | untreated | 53.60 | 0.104 |
| | | | RNP32 | 50.09 | 0.238 |
| | CEL211-001 | SCD | untreated | 41.62 | 0.156 |
| | | | RNP32 | 21.27 | 0.330 |

[0543] Next, to assess whether the reduced sickling and increased flexibility of SCD RBCs derived from RNP32-edited CD34+ cells would lead to improved rheological behavior, RBCs were evaluated using a microfluidic platform. The microfluidic platform replicated blood flow in the microvasculature for direct observation of the bulk flow of cultured SCD RBCs under varying oxygen conditions. When deoxygenated, the intracellular polymerization of HbS makes RBCs inflexible and rigid which translates to a drop in the velocity through the microchannel. Briefly, one hundred and fifty million RBCs following filtration after erythroid induction as described above were spun down and resuspended in fresh Step-3 media to a final concentration of 10×10⁶ cells/mL. Cultured RBCs were washed with PBS, and resuspended in PBS to achieve a 20% target hematocrit. A 15 μL volume of cultured RBCs was loaded onto the device under constant pressure and subjected to varying levels of oxygen controlled via a gas mixing system. The flow was captured by a high-speed camera and the blood velocity through the channel was determined using the Kanade-Lucus-Tomasi feature tracking in MATLAB. The velocity of the cells was then measured under a range of oxygen levels. Typical oxygen levels observed in the venous circulation are approximately 4% to 6% oxygen.

[0544] RBCs from normal donors showed no oxygen-dependent rheology impairment (FIG. 76A, FIG. 76B). While the rheological behavior of RBCs derived from RNP32-edited SCD CD34+ cells did not completely normalize, they exhibited lower magnitudes of impairment during hypoxia and required more extreme hypoxia before the onset of a decrease in velocity compared with RBCs derived from untreated SCD CD34+ cells (10% oxygen for RBCs derived from untreated SCD CD34+ cells and 6% oxygen for RBCs derived from RNP32-edited SCD CD34+ cells). As shown in FIG. 76C, RBCs derived from RNP32-edited SCD CD34+ cells (circles) demonstrated a drastically improved rheological behavior compared to RBCs derived from untreated SCD CD34+ cells (triangles) at physiological oxygen levels. Unedited RBCs from normal donors (diamonds) showed no oxygen-dependent rheology impairment. While the rheological behavior of RBCs derived from RNP32-edited SCD CD34+ cells did not completely normalize, they exhibited lower magnitudes of impairment during hypoxia and required more extreme hypoxia for the onset of decrease in velocity compared with RBCs derived from unedited SCD patient CD34+ cells. Notably, at oxygen levels typically observed in the venous circulation, the velocity of red blood cells derived from RNP32-edited CD34 cells was almost fully normalized compared to RBC derived normal donor cells. The reduction in rheology impairment under hypoxia was also strongly correlated with increased levels of HbF in the RBCs (FIG. 76D, FIG. 76E). For example FIG. 76E shows that RBCs that had the highest HbF levels exhibited the highest velocity at a physiological oxygen level of 4%. This indicates that the phenotypic correction of RBCs from sickle cell patients is greatest with very high levels of HbF expression, as observed with RBCs derived from RNP32-edited SCD CD34+ cells (FIG. 76D, FIG. 76E).

[0545] In sum, two studies were conducted to interrogate editing of SCD and normal CD34+ cells with RNP32 and determine the functional outcome in the erythroid progeny. RNP32 efficiently edited normal and SCD CD34+ cells, achieving approximately 90% insertions and/or deletions (indels) at Day 3 post-electroporation. Editing of CD34+ cells with RNP32 did not negatively impact the erythroid differentiation or maturation. Robust HbF expression was obtained, averaging 43.26% and 54.21% of total hemoglobin in RBCs derived from RNP32-edited normal and SCD CD34+ cells respectively, distributed in a pancellular fashion (averaging >92% RBCs). The high level of HbF expression in RBCs derived from RNP32-edited SCD CD34+ cells coincided with decreased sickling, improved deformability under shear stress, and improved flow through microfluidic channels when deoxygenated compared to RBCs derived from untreated SCD CD34+ cells. Potentially therapeutically relevant levels of HbF were achieved through highly efficient RNP32 editing of CD34+ cells at the HBG1 and HBG2 promoter region. This translates to a reduction in sickling and improved rheological properties in red blood cells, which is advantageous for an autologous cell therapy using RNP32 for the treatment of sickle-cell disease.

### Example 29: Meta-Analysis of On-Target Indels Generated by RNP32 in CD34+ Cells

[0546] Following CRISPR/Cas editing, DNA repair mechanisms like non-homologous end joining (NHEJ) and microhomology-mediated end joining (MMEJ) result in highly heterogeneous repair outcomes comprising hundreds of different genotypes. The editing outcomes produced when using Cpf1 (also referred to as AsCas12a), the enzyme used for RNP32, have not been characterized in detail. Cpf1 editing results in a four nucleotide 5′ overhang (see FIG. 77A), which is quite different from the blunt ends of SpCas9 edits (see FIG. 63A). As used in this example, “cut site” is used to refer to the position at the middle of the expected overhang resulting from editing with RNP32 (FIG. 77A, grey dashed line).

[0547] DNA repair mechanisms often create indels ranging in size from 1 to approximately 50 base pairs (bp), which are typically detected by PCR-based targeted sequencing assays. More complex genomic repair outcomes have also been described (Giannoukos 2018; Kosicki 2018; Bothmer 2020), and include deletions at the on-target locus larger than ˜50 bp, called resections, and translocations. These more complex rearrangements require other methods for a precise quantification (see, e.g., PCT/US2018/012652).

[0548] To determine the indel profile generated by RNP32, indels ranging in size from 1 bp to approximately 50 bp at the distal CCAAT-box generated by RNP32 were characterized using PCR-based targeted sequencing assays. The indel patterns were studied in a variety of samples, spanning different genotypes (normal vs sickle cell disease) and mobilization regimens (plerixafor alone vs G-CSF alone vs G-CSF+ plerixafor) (Table 29). This meta-analysis demonstrates that RNP editing at the CCAAT box results in a distinct indel profile that is reproducible across a variety of samples and levels of editing.

TABLE 29
Samples used in meta-analysis

| Exp. #/ | Donor | CEL ID | Donor Mobilization | RNP32 |
|---|---|---|---|---|
| Batch # | Type | (Donor) | Regimen | [μM] |
| SCD011 | Normal | CEL238-001 | G-CSF & plerixafor | 6 |
| SCD011 | SCD | CEL211-001 | plerixafor | 6 |
| SCD014 | Normal | CEL021-014 | G-CSF & plerixafor | 6 |
| SCD014 | Normal | CEL042-001 | G-CSF | 6 |
| SCD014 | Normal | CEL238-001 | G-CSF & plerixafor | 6 |
| SCD014 | SCD | CEL211-001 | plerixafor | 6 |
| SCD014 | SCD | CEL239-001 | plerixafor | 6 |
| SCD014 | SCD | CEL240-001 | plerixafor | 6 |
| SCD014 | SCD | CEL241-001 | plerixafor | 6 |
| SCD1 | Normal | CEL172-008 | G-CSF & plerixafor | 8 |
| SCD1 | Normal | CEL182-008 | G-CSF & plerixafor | 8 |
| SCD1 | Normal | CEL171-008 | G-CSF & plerixafor | 8 |
| SCD1 | Normal | CEL192-008 | G-CSF & plerixafor | 8 |
| SCD1 | Normal | CEL168-008 | G-CSF & plerixafor | 8 |

Samples were obtained from research-scale (SCD011, SCD014) or large-scale (SCD1) processes. No significant differences were observed in RNP32-edited cells produced using research-scale versus large-scale processes (data not shown). The donors from experiments SCD011 and SCD014 are the same as those in Example 28 (Table 27).

[0549] Mobilized peripheral blood CD34+ cells from 12 distinct donors (normal donors and SCD donors) were used in this meta-analysis (Table 29). Five samples from normal donors were generated using a large-scale process (Table 29, Experiment SCD1). Briefly, leukopaks (HemaCare or KeyBiologics) were obtained from normal donors mobilized with granulocyte colony stimulating factor (G-CSF) and plerixafor. CD34+ cells were enriched using the CliniMACS Plus system, aliquoted, cryopreserved in Cryostor CS10, and stored in liquid nitrogen vapor phase. CD34⁺ cells were thawed, cultured for 2 days in complete media consisting of X-Vivo 10, supplemented with 1× Glutamax, 100 ng/mL stem cell factor (SCF), 100 ng/mL thrombopoietin (TPO), and 100 ng/mL FMS-like tyrosine kinase 3 ligand (Flt3L), mixed with RNP32 (at a gRNA/protein molar ratio of 2) to a final concentration of 8 μM, and electroporated with a Maxcyte GT electroporation device per manufacturer's instruction. The cellular materials were cultured overnight following electroporation, aliquoted, and cryopreserved in Cryostor CS10, and stored in liquid nitrogen vapor phase until ready for experimentation.

[0550] Nine samples were generated using a research-scale process (Table 29, SCD011 and SCD014). Cells were thawed, washed, and cultured at 1×10⁶ cells/mL in complete media consisting of X-Vivo 10, supplemented with 1× Glutamax, 100 ng/mL stem cell factor (SCF), 100 ng/mL thrombopoietin (TPO), and 100 ng/mL FMS-like tyrosine kinase 3 ligand (F1t3L) for 2 days in a humidified incubator at 37° C., 5% carbon dioxide (CO2). After 2 days of culture, cells were collected and resuspended in Maxcyte electroporation buffer. RNP32 (at a gRNA/protein molar ratio of 2) was added to the cell suspension to a final concentration of 6 μM. The mixture was transferred to a Maxcyte OC-100 cartridge and electroporated with a Maxcyte GT electroporation device per manufacturer's instruction. After electroporation, cells were cultured in complete media for 1 day prior to harvesting for analysis.

[0551] The fraction of small indels present in the samples was assessed by Illumina amplicon sequencing (ILL-seq), following library preparation method and analysis. A 15 bp window around the expected cut site was used in the analysis to calculate editing rates. The oligonucleotides and amplicon used to generate the targeted amplicon sequencing products are provided in FIG. 77A and FIG. 77B.

[0552] To characterize editing by RNP32, the indels generated in each sample were analyzed and processed. The results were summarized by looking at 1) percentage deletion for each base within the target region, 2) distribution of insertion and deletion center positions, and 3) distribution of insertion and deletion lengths. To perform these analyses, the cigar strings for the reads in the alignment bam files were processed, using the following steps:
[0553] 5) Group indels appearing in the same read.
[0554] 6) Create indel_id for indels from each read. Indel_id is a string identifying the indel, shown as indel_start_position+_+indel_length+_+ID. Where ID is NA for deletions and for insertions is the sequence inserted. See example in FIG. 77D.
[0555] 7) Group reads with the same indel_id.
[0556] 8) Count number of reads with the same indels and calculate their total fractions (including wt) and fractions in indels (excluding wt). Fractions in indels allow for a comparison between samples when they have different amounts of total editing.

[0557] To analyze the reproducibility of the individual indels detected across samples, the number of times they were detected across samples and their average percentage in indels was estimated. When an indel was not detected in a particular sample it was assumed to have a percentage of 0%.

[0558] The total percentage of indels for each RNP32-edited sample in this analysis are shown in Table 30. All the samples (including normal and SCD donors) exhibited overall editing greater than 72.6% (ranging from 72.6% to 89.2%), except for three samples that exhibited lower editing between about 40% to 53%. The samples exhibiting lower editing had low viability potentially associated with lower numbers of cells used for electroporation.

TABLE 30
Editing results for all the samples

| Donor Type | CEL ID | EXP # | Total Indels % |
|---|---|---|---|
| Normal | CEL238-001 | SCD011 | 84.39% |
| SCD | CEL211-001 | SCD011 | 79.50% |
| Normal | CEL021-014 | SCD014 | 40.07% |
| Normal | CEL042-001 | SCD014 | 78.37% |
| Normal | CEL238-001 | SCD014 | 80.70% |
| SCD | CEL211-001 | SCD014 | 46.78% |
| SCD | CEL239-001 | SCD014 | 52.92% |
| SCD | CEL240-001 | SCD014 | 75.38% |
| SCD | CEL241-001 | SCD014 | 72.63% |
| Normal | CEL172-008 | SCD1 | 88.91% |
| Normal | CEL182-008 | SCD1 | 87.11% |
| Normal | CEL171-008 | SCD1 | 84.04% |
| Normal | CEL192-008 | SCD1 | 89.24% |
| Normal | CEL168-008 | SCD1 | 88.76% |

[0559] In total, 385 unique indels were detected, counting only those indels that were found at a percentage above 0.1% (out of total indels) in at least one of the samples in Table 32.

[0560] The wt allele and the top 20 indels are shown in FIG. 79, alongside their relative average frequency (amongst all samples). The most abundant indel, 159_-18_NA, was present on average 15.15% among all the samples. Notably, indel 157_-13_NA, more commonly known as the 13 bp HPFH deletion, was detected on average at 2.63%. The 13 bp deletion is a naturally occurring mutation associated with elevated HbF.

[0561] Indel analysis of the bulk CD34+ population (progenitors) 24-72 hours after electroporation can determine whether edits at this site were derived from Cas12a or Cas9. In the case of Cas12a, the most dominant indel detected at this timepoint is the 159_-18 deletion, however with Cas9 the most frequent indel is the 157_-13 deletion. In addition, the most common NHEJ indel generated by Cas9 at this site is a −1 bp deletion (169_-1_NA, Table 31), which occurred here at ˜9.6%. In contrast, following editing with Cas12a, the most common NHEJ indels generated are 6 bp and 4 bp deletions (165_-6_NA, and 167_-4_NA; Table 31, RNP58; Table 32, RNP32). Cpf1 generally produces larger NHEJ deletions, when compared to Cas9 at this site.

[0562] Indel analysis of the bulk CD34+ population (progenitors) 24-72 hours after electroporation can determine whether edits (indels) at this site were derived from Cpf1 or Cas9. For example, in the case of Cpf1, the most dominant indel detected at this timepoint is the 159_-18 deletion at an average percentage of 15.15% of the total indels (Table 32) compared to an average percentage of 1.35% for SpCas9, see Table 31. However, the most frequent indel for SpCas9 is the 157_-13 deletion at an average percentage of 31.88% of the total indels (Table 31) versus an average percentage of 2.63% of the total indels for Cpf1 (Table 32).

[0563] Results for the distributions of indel center points and indel lengths are shown in FIGS. 80 and 81, respectively. The most common indel center position (peak) was located 6 bp away from the cut site, at position TSS:-113. Peaks in the deletion length distribution were observed at 13 bp and 18 bp, corresponding mostly to the 157_-13_NA and 159_-18_NA MMEJ indels. Due to the resection and utilization of microhomology sequences during MMEJ repair, this pathway tends to generate larger size deletions than those mediated via the NHEJ pathway. Besides those, the most commonly observed deletion length was 5 bp with 9.30% (FIG. 82). Insertions were rarely detected (total contribution of 0.50%). Deletions between 1 bp and 25 bp had a total contribution of 92.03% among all indels (deletions between 3 bp and 25 bp had a total contribution of 85.85% among all indels, deletions between 4 bp and 25 bp had a total contribution of 80.35% among all indels, and deletions between 5 bp and 25 bp had a total contribution of 72.04% among all indels) (Table 32). Overall, both the distribution of indel center points and indel lengths were very similar across the Normal and SCD samples. As shown in FIG. 63C above, the generation of indels 4 bp and longer results in the highest induction of HbF.

[0564] The results for the percentage of bases deleted along the target region (deletion profile) are shown in FIG. 83 and FIG. 84 (normalized to the same maximum value of 1 for comparison between samples). The shapes of the profiles are very similar across all samples, despite having different total editing values (Table 30). No major differences were observed between Normal donor (Normal) and sickle cell disease donor (SCD) samples or different mobilization regimens. The deletion profiles show that the peak of the distribution (most commonly deleted base) is 6 bp toward the TSS from the cut site, at TSS: -113.

[0565] Of the total of 385 indels detected at 0.1% in any of the samples evaluated, 108 indels were detected in all 14 samples (FIG. 85 and Table 32). All indels present at an average percentage in indel greater than 0.22% were detected in all 14 samples (a total of 55 indels, above the grey line FIG. 86 and also in Table 32), and had a total indel contribution of 69.90%. Overall, the reproducibility of indel detection was very high.

[0566] To look in more detail at the consistency in each individual indel frequency between the indels detected across all samples, their pairwise correlation plots and R² were calculated. To avoid under sampling bias, when comparing two samples, only indels which had a minimum percentage of 0.1% (of all indels) in at least one of the two samples was considered. Excluding the three samples with editing below 60% due to the low number of cells used for electroporation (see Table 29), all R² values were greater than 0.8 (data not shown). Overall, the correlation between indel percentages among the samples with high editing was very high.

[0567] In sum, a total of 385 unique indels were detected at a percentage above 0.1% in at least one of the 14 edited samples tested in this Example. The most abundant indel, 159_-18_NA, was present between all the indels on average 15.15% among all the samples. Indel 157_-13_NA, more commonly known as the 13 bp HPFH deletion, was detected on average at 2.63%. The shapes of the indel profiles for all edited samples were very similar across all studies, despite having different total editing values. No major differences were observed between Normal donor and SCD donor samples or different mobilization regimens.

[0568] Evaluation of individual indel positions showed that indels generated by RNP32 were mostly centered around position TSS: -113, which was also the most commonly deleted base observed. Evaluation of the distribution of indel lengths showed peaks at -18 and -13 corresponding primarily to the MMEJ indels, 159_-18_NA (most abundant indel, starting at TSS: -104 and of length 18 bases) and 157_-13NA (starting at TSS: -102, 13 bp HPFH deletion). Besides these, the most commonly observed deletion length was 5 bp at 9.30%. Insertions were rarely detected (total contribution of 0.50%). Deletions between 1 bp and 25 bp had a total contribution of 92.03% among all indels. Overall, the distribution of indel length and center position were very similar between the Normal and SCD samples. Of the total of 385 unique indels, 108 indels were detected in all 14 samples. All indels present at an average percentage in indel greater than 0.22% were detected in all 14 samples (a total of 55 indels), and had a total indel contribution of 69.90%. Pairwise correlations among the detected indels (excluding the three samples with editing below 60%) had R² values greater than 0.8.

[0569] This data demonstrate that RNP32 editing at the HBG1/2 distal CCAAT box results in a unique indel signature that is reproducible across a variety of samples and levels of editing.

### Example 30: Analysis of Normal Donor CD34+ Cell RNP32 Editing Efficiency Including 4.9 kb Fragment Deletion

[0570] The on-target editing efficiency of RNP32 in mobilized peripheral blood CD34+ cells obtained from four independent normal adult donors was assessed, as well as the frequency of deletion of the 4.9 kb fragment between the two RNP32 cut sites. In addition, the on-target indel levels and frequency of the 4.9 kb deletion were also measured in several subpopulations of HSPC sorted from total CD34+ cells to address whether phenotypic long-term hematopoietic stem cells (LT-HSC) could be edited efficiently with RNP32.

[0571] Leukopaks from four normal donors treated with granulocyte colony-stimulating factor (G-CSF) plus Mozobil or with G-CSF alone were obtained from HemaCare. CD34+ cells (Lot: CEL045-002, CEL046-004, CEL047-002, and CEL021-021) were enriched using the CliniMACS system (Miltenyi), aliquoted, and cryopreserved in Cryostor CS10. Cells were thawed, washed, and cultured at 1×10⁶ cells/mL in complete media consisting of X-Vivo 10, supplemented with 1× Glutamax, 100 ng/mL stem cell factor (SCF), 100 ng/mL thrombopoietin (TPO), and 100 ng/mL FMS-like tyrosine kinase 3 ligand (Ft3L) for 2 days in a humidified incubator at 37° C., 5% carbon dioxide (CO2). After 2 days of cultures, cells were collected and resuspended in Maxcyte electroporation buffer. RNP32 (gRNA/protein molar ratio of 2) was added to the cell suspension to a final concentration of 6 μM. The mixture was transferred to a Maxcyte OC-100 cartridge and electroporated with a Maxcyte GT electroporation device per manufacturer's instruction.

[0572] RNP32 recognizes both HBG1 and HBG2 promoters. Cleavage at both sites can lead to the deletion of the 4.9 kb intervening sequence. To assess the frequency of the 4.9 kb fragment deletion, the two ddPCR assays, reference amplicon and on-target amplicon, were performed as described in Example 28 (see FIGS. 70A-70D). Briefly, cells at 1 or 2 days post-electroporation with RNP32, and sorted cells were resuspended in Quick Extract at a concentration of 2,000 to 4,000 cells/μL. Crude genomic deoxyribonucleic acid (gDNA) extraction was conducted by subjecting the lysate to the following conditions in a thermocycler: 15 min at 65° C. followed by 10 min at 95° C. Crude gDNA was then analyzed for indels (insertions and deletions) by next generation sequencing (using the primers set forth in FIG. 77A) and 4.9 kb fragment deletion assessment by digital droplet polymerase chain reaction (ddPCR).

[0573] RNP32 edited the HBG1 and HBG2 promoters of normal donor CD34+ cells in an RNP concentration-, and time-dependent manner without significantly impacting the cell viability (FIG. 87A, 87B, FIG. 88, and FIG. 89). At 8 μM, the highest concentration of RNP32 tested, an average of 86% on-target indel level was achieved in normal donor CD34+ cells by Day 1 and rose to 91% by Day 2 post-electroporation (FIG. 90). The increase was more evident at lower RNP concentration with average indel level at 1 μM rising from 62% to 77% by Day 1 and Day 2 post-electroporation. By Day 2 post-electroporation, ≥85% on-target indel level was routinely achieved when CD34+ cells were transfected with ≥3 μM RNP32.

[0574] Editing of CD34+ cells with RNP32 resulted in frequent deletion of the 4.9 kb intervening fragment between the two RNP32 cut sites at the HBG1 and HBG2 gene promoters, respectively. On average, approximately 35% of the beta globin loci in the CD34+ cells had the 4.9 kb fragment deleted both at Day 1 and Day 2 post electroporation with ≥2 μM of RNP32 (FIG. 91A, FIG. 91B and FIG. 92). The 4.9 kb fragment deletion to indel ratio in CD34+ cells was approximately 0.47 at Day 1 and decreased to approximately 0.40 at Day 2 post-electroporation with ≥2 μM of RNP32.

[0575] CD34+ cells are heterogeneous and comprise lineage-restricted progenitors, MPPs, as well as self-renewing LT-HSCs. As LT-HSCs will be responsible for providing long-term reconstitution of a patient's hematopoietic system, high levels of editing in this population are pertinent for the durability of the treatment. To address whether different subpopulations of CD34+ cells were edited similarly, the on-target indel levels in CMPs, MPPs, and phenotypic LT-HSCs, defined by surface immunophenotype, was evaluated and compared to the on-target indel levels in total CD34+ cells across multiple RNP concentrations.

[0576] Briefly, CD34+ cells were sorted two days post electroporation with RNP32 to obtain three subpopulations of HSPCs including phenotypic LT-HSC, multipotent progenitor (MPP) cells, and common myeloid progenitor (CMP) cells using a BD fluorescence-activated cell sorting (FACS)Aria Fusion cell sorter (BD Biosciences). Gating was set to collect the following enriched CD34+ cell subpopulations: phenotypic LT-HSC (P7, CD34 bright, CD38 low/negative, CD90+, CD45RA−), MPP (P6, CD34 bright, CD38 low/negative, CD90−, CD45RA−), and CMP (P9, CD34 bright, CD38 high, CD123+, CD45RA−).

[0577] Of the three subpopulations, CMPs consistently had the highest on-target indel levels and phenotypic LT-HSCs had the lowest on-target indel levels (analyzed via NGS using the primers set forth in FIG. 77B) across all RNP concentrations evaluated (FIG. 93A, FIG. 93B and FIG. 94) (Study MAX072). Nevertheless, at ≥3 μM RNP32, on-target indel levels of >85% were achieved in phenotypic LT-HSCs, similar to the on-target indel levels detected in total CD34+ cells, suggesting that self-renewing LT-HSCs can be efficiently edited using RNP32 (FIG. 93A, FIG. 93B and FIG. 94).

[0578] RNP32 editing resulted in deletion of the 4.9 kb fragment in all three subpopulations of hematopoietic stem and progenitor cells tested (FIG. 95A and FIG. 96). Of the three subpopulations, CMPs consistently had the highest levels of deletion of the 4.9 kb fragment and phenotypic LT-HSCs had the lowest levels of deletion of the 4.9 kb fragment across all RNP concentrations evaluated. The 4.9 kb fragment to indel ratio averaged across all RNP concentrations was approximately 0.43, 0.49, 0.33, and 0.25 in total CD34+ cells, CMP, MPP, and phenotypic LT-HSC respectively (FIG. 95B), demonstrating that the LT-HSCs had less frequent deletion of the 4.9 kb fragment as a result of RNP32 editing than their short term counterparts. Retention of the 4.9 kb inter-edit region is beneficial because a higher deletion of the 4.9 kb fragment results in a lower production of HbF. Therefore, lower levels of deletion of the 4.9 kb fragment in LT-HSCs edited by RNP32 is advantageous. The results herein demonstrate that editing with RNP32 can generate cells with clinically relevant levels of healthy HbF.

[0579] In sum, on-target indel levels and the associated 4.9 kb fragment deletion between the HBG1 and HBG2 promotors were assessed following electroporation of normal human donor CD34+ cells with RNP32. RNP32 was highly efficient at editing CD34+ cells, with consistent editing achieved across multiple RNP batches and cell donor lots. Greater than 85% on target indels in CD34+ cells were routinely achieved when electroporated with >3 μM RNP32. Comparable levels of indels between total CD34+ cells and sorted phenotypic LT HSC were also observed when electroporated with >3 μM RNP32. Loss of the 4.9 kb fragment between two RNP32 cut sites occurred at a frequency that was cell subpopulation dependent. Total CD34+ cells lost the 4.9 kb fragment at a frequency of approximately 0.4 per indel. This frequency dropped to approximately 0.25 per indel in the phenotypic LT-HSC subset of CD34+ cells.

### Example 31: Treatment of R-Hemoglobinopathy Using Edited Hematopoietic Stem Cells

[0580] The methods and genome editing systems disclosed herein may be used for the treatment of a (β-hemoglobinopathy, such as sickle cell disease or beta-thalassemia, in a patient in need thereof. For example, genome editing may be performed on cells derived from the patient in an autologous procedure. Correction of the patient's cells ex-vivo and reintroduction of the cells into the patient may result in increased HbF expression and treatment of the β-hemoglobinopathy.

[0581] For example, HSCs may be extracted from the bone marrow of a patient with a β-hemoglobinopathy using techniques that are well-known to skilled artisans. The HSCs may be modified using methods disclosed herein for genome editing. For example, RNPs comprised of guide RNAs (gRNA) that target one or more regions in the HBG gene complexed with an RNA-guided nuclease may be used to edit the HSCs. In certain embodiments, the RNA-guided nuclease may be a Cpf1 protein. In certain embodiments, the Cpf1 protein may be a modified Cpf1 protein. In certain embodiments, the modified Cpf1 protein may be encoded by a sequence set forth in SEQ ID NOs:1000, 1001, 1008-1018, 1032, 1035-39, 1094-1097, 1107-09 (Cpf1 polypeptide sequences) or SEQ ID NOs:1019-1021, 1110-17 (Cpf1 polynucleotide sequences). For example, the modified Cpf1 protein may be encoded by the sequence set forth in SEQ ID NO:1097. In certain embodiments, the gRNA may be a modified or unmodified gRNA. In certain embodiments, the gRNA may comprise a sequence set forth in Table 13, Table 18, or Table 19. For example, in certain embodiments, the gRNA may comprise the sequence set forth in SEQ ID NO:1051. In certain embodiments, the RNP complex may comprise an RNP complex set forth in Table 21. For example, the RNP complex may include a gRNA comprising the sequence set forth in SEQ ID NO:1051 and a modified Cpf1 protein encoded by the sequence set forth in SEQ ID NO:1097 (RNP32, Table 21). In certain embodiments, modified HSCs have an increase in the frequency or level of an indel in the human HBG1 gene, HBG2 gene, or both, relative to unmodified HSCs. In certain embodiments, the modified HSCs can differentiate into erythroid cells that express an increased level of HbF. A population of the modified HSCs may be selected for reintroduction into the patient via transfusion or other methods known to skilled artisans. The population of modified HSCs for reintroduction may be selected based on, for example, increased HbF expression of the erythroid progeny of the modified HSCs or increased indel frequency of the modified HSCs. In some embodiments, any form of ablation prior to reintroduction of the cells may be used to enhance engraftment of the modified HSCs. In other embodiments, peripheral blood stem cells (PBSCs) can be extracted from a patient with a β-hemoglobinopathy using techniques that are well-known to skilled artisans (e.g., apheresis or leukapheresis) and stem cells can be removed from the PBSCs. The genome editing methods described above can be performed on the stem cells and the modified stem cells can be reintroduced into the patient as described above.

TABLE 20
Cpf1 Protein Variants

| | Cpf1 Variant Amino | Cpf1 Variant Nucleotide |
|---|---|---|
| Cpf1 Variant ID | Acid SEQ ID NO | SEQ ID NO |
| His-AsCpf1-sNLS- | SEQ ID NO: 1032 | SEQ ID NO: 1110 |
| sNLS H800A | | |
| Cpf1-1 | SEQ ID NO: 1094 | SEQ ID NO: 1111 |
| Cpf1-2 | SEQ ID NO: 1095 | SEQ ID NO: 1112 |
| Cpf1-3 | SEQ ID NO: 1096 | SEQ ID NO: 1113 |
| Cpf1-4 | SEQ ID NO: 1097 | SEQ ID NO: 1114 |
| Cpf1-5 | SEQ ID NO: 1107 | SEQ ID NO: 1115 |
| Cpf1-6 | SEQ ID NO: 1108 | SEQ ID NO: 1116 |
| Cpf1-7 | SEQ ID NO: 1109 | SEQ ID NO: 1117 |

TABLE 21
RNP complexes

| | | Cpf1 Amino Acid |
|---|---|---|
| RNP Name | gRNA SEQ ID NO* | SEQ ID NO** |
| RNP64 | SEQ ID NO: 1022 | SEQ ID NO: 1109 |
| RNP1 | SEQ ID NO: 1051 | SEQ ID NO: 1095 |
| RNP2 | SEQ ID NO: 1098 | SEQ ID NO: 1094 |
| RNP3 | SEQ ID NO: 1099 | SEQ ID NO: 1094 |
| RNP4 | SEQ ID NO: 1100 | SEQ ID NO: 1094 |
| RNP5 | SEQ ID NO: 1101 | SEQ ID NO: 1094 |
| RNP6 | SEQ ID NO: 1068 | SEQ ID NO: 1094 |
| RNP7 | SEQ ID NO: 1102 | SEQ ID NO: 1094 |
| RNP8 | SEQ ID NO: 1081 | SEQ ID NO: 1094 |
| RNP9 | SEQ ID NO: 1082 | SEQ ID NO: 1094 |
| RNP10 | SEQ ID NO: 1083 | SEQ ID NO: 1094 |
| RNP11 | SEQ ID NO: 1069 | SEQ ID NO: 1094 |
| RNP12 | SEQ ID NO: 1084 | SEQ ID NO: 1094 |
| RNP16 | SEQ ID NO: 1085 | SEQ ID NO: 1094 |
| RNP19 | SEQ ID NO: 1088 | SEQ ID NO: 1094 |
| RNP20 | SEQ ID NO: 1089 | SEQ ID NO: 1094 |
| RNP21 | SEQ ID NO: 1090 | SEQ ID NO: 1094 |
| RNP22 | SEQ ID NO: 1091 | SEQ ID NO: 1094 |
| RNP23 | SEQ ID NO: 1048 | SEQ ID NO: 1097 |
| RNP24 | SEQ ID NO: 1093 | SEQ ID NO: 1094 |
| RNP26 | SEQ ID NO: 1051 | SEQ ID NO: 1096 |
| RNP27 | SEQ ID NO: 1051 | SEQ ID NO: 1107 |
| RNP28 | SEQ ID NO: 1051 | SEQ ID NO: 1108 |
| RNP29 | SEQ ID NO: 1103 | SEQ ID NO: 1094 |
| RNP30 | SEQ ID NO: 1104 | SEQ ID NO: 1094 |
| RNP31 | SEQ ID NO: 1105 | SEQ ID NO: 1094 |
| RNP32 | SEQ ID NO: 1051 | SEQ ID NO: 1097 |
| RNP33 | SEQ ID NO: 1022 | SEQ ID NO: 1032 |
| RNP34 | SEQ ID NO: 1041 | SEQ ID NO: 1032 |
| RNP37 | SEQ ID NO: 1042 | SEQ ID NO: 1032 |
| RNP38 | SEQ ID NO: 1043 | SEQ ID NO: 1032 |
| RNP39 | SEQ ID NO: 1044 | SEQ ID NO: 1032 |
| RNP40 | SEQ ID NO: 1045 | SEQ ID NO: 1032 |
| RNP41 | SEQ ID NO: 1046 | SEQ ID NO: 1032 |
| RNP42 | SEQ ID NO: 1047 | SEQ ID NO: 1032 |
| RNP43 | SEQ ID NO: 1048 | SEQ ID NO: 1032 |
| RNP44 | SEQ ID NO: 1049 | SEQ ID NO: 1032 |
| RNP45 | SEQ ID NO: 1022 | SEQ ID NO: 1094 |
| RNP46 | SEQ ID NO: 1046 | SEQ ID NO: 1094 |
| RNP47 | SEQ ID NO: 1047 | SEQ ID NO: 1094 |
| RNP48 | SEQ ID NO: 1052 | SEQ ID NO: 1094 |
| RNP49 | SEQ ID NO: 1048 | SEQ ID NO: 1094 |
| RNP50 | SEQ ID NO: 1053 | SEQ ID NO: 1094 |
| RNP51 | SEQ ID NO: 1054 | SEQ ID NO: 1094 |
| RNP52 | SEQ ID NO: 1055 | SEQ ID NO: 1094 |
| RNP53 | SEQ ID NO: 1056 | SEQ ID NO: 1094 |
| RNP54 | SEQ ID NO: 1057 | SEQ ID NO: 1094 |
| RNP55 | SEQ ID NO: 1058 | SEQ ID NO: 1094 |
| RNP56 | SEQ ID NO: 1059 | SEQ ID NO: 1094 |
| RNP57 | SEQ ID NO: 1060 | SEQ ID NO: 1094 |
| RNP58 | SEQ ID NO: 1051 | SEQ ID NO: 1094 |
| RNP59 | SEQ ID NO: 1067 | SEQ ID NO: 1094 |
| RNP60 | SEQ ID NO: 1068 | SEQ ID NO: 1094 |
| RNP61 | SEQ ID NO: 1041 | SEQ ID NO: 1095 |
| RNP62 | SEQ ID NO: 1041 | SEQ ID NO: 1094 |
| RNP63 | SEQ ID NO: 1022 | SEQ ID NO: 1095 |

*See Table 19
**See Table 20

TABLE 22
Cpf1 HBG1 targeting domains and expected cleavage sites

| | gRNA | gRNA | Targeting | Expected | | |
|---|---|---|---|---|---|---|
| | Targeting | Targeting | Domain | cleavage site | | Targeting |
| gRNA | Domain | Domain | coordinates | coordinates | | Domain |
| ID | (RNA) | (DNA) | at HBG1* | at HBG1^{#} | Strand | Length |
| HBG1-1 | CCUUGUCAA | CCTTGTCA | Chr11: | Chr11: 5249973, | + | 20 |
| | GGCUAUUG | AGGCTATT | 5249954- | Chr11: 5249977 | | |
| | GUC (SEQ ID | GGTC (SEQ | 5249974 | | | |
| | NO: 1002) | ID NO: 1003) | | | | |
| HBG1-1 | CCUUGUCAA | CCTTGTCA | Chr11: | Chr11: 5249973, | + | 21 |
| (21 mer) | GGCUAUUG | AGGCTATT | 5249954- | Chr11: 5249977 | | |
| | GUCA (SEQ | GGTCA (SEQ | Chr11: 5249975 | | | |
| | ID NO: | ID NO: 1255) | | | | |
| | 1254) | | | | | |
| HBG1-1 | CCUUGUCAA | CCTTGTCA | Chr11: | Chr11: 5249973, | + | 22 |
| (22 mer) | GGCUAUUG | AGGCTATT | 5249954- | Chr11: 5249977 | | |
| | GUCAA (SEQ | GGTCAA | Chr11: 5249976 | | | |
| | ID NO: | (SEQ ID | | | | |
| | 1256) | NO: 1257) | | | | |
| HBG1-1 | CCUUGUCAA | CCTTGTCA | Chr11: | Chr11: 5249973, | + | 23 |
| (23 mer) | GGCUAUUG | AGGCTATT | 5249954- | Chr11: 5249977 | | |
| | GUCAAG | GGTCAAG | Chr11: 5249976 | | | |
| | (SEQ ID | (SEQ ID | | | | |
| | NO: 1258) | NO: 1259) | | | | |
| AsCpf1 | AGACAGAU | AGACAGAT | Chr11: | Chr11: 5250042, | + | 20 |
| HBG1 | AUUUGCAU | ATTTGCATT | 5250023- | Chr11: 5250046 | | |
| Promoter- | UGAG (SEQ | GAG (SEQ ID | Chr11:5250043 | | | |
| 1 | ID NO: | NO: 1140) | | | | |
| | 1139) | | | | | |
| AsCpf1 | AGACAGAU | AGACAGAT | Chr11: | Chr11: 5250042, | + | 21 |
| HBG1 | AUUUGCAU | ATTTGCATT | 5250023- | Chr11: 5250046 | | |
| Promoter- | UGAGA (SEQ | GAGA (SEQ | Chr11: 5250044 | | | |
| 1 | ID NO: | ID NO: 1261) | | | | |
| (21 mer) | 1260) | | | | | |
| AsCpf1 | CAUUGAGA | CATTGAGA | Chr11: | Chr11: 5250055, | + | 20 |
| HBG1 | UAGUGUGG | TAGTGTGG | 5250036- | Chr11: 5250059 | | |
| Promoter- | GGAA (SEQ | GGAA (SEQ | Chr11:5250056 | | | |
| 2 | ID NO: | ID NO: 1142) | | | | |
| | 1141) | | | | | |
| AsCpf1 | CAUUGAGA | CATTGAGA | Chr11: | Chr11: 5250055, | + | 21 |
| HBG1 | UAGUGUGG | TAGTGTGG | 5250036- | Chr11: 5250059 | | |
| Promoter- | GGAAG (SEQ | GGAAG | Chr11: 5250057 | | | |
| 2 | ID NO: | (SEQ ID | | | | |
| (21 mer) | 1262) | NO: 1263) | | | | |
| AsCpf1 | CUUCUCCCA | CTTCTCCCA | Chr11: | Chr11: 5250179, | + | 20 |
| HBG1 | UCAUAGAG | TCATAGAG | 5250160- | Chr11: 5250183 | | |
| Promoter- | GAU (SEQ ID | GAT (SEQ ID | Chr11:5250180 | | | |
| 6 | NO: 1149) | NO: 1150) | | | | |
| AsCpf1 | CUUCUCCCA | CTTCTCCCA | Chr11: | Chr11: 5250179, | + | 21 |
| HBG1 | UCAUAGAG | TCATAGAG | 5250160- | Chr11: 5250183 | | |
| Promoter- | GAUA (SEQ | GATA (SEQ | Chr11: 5250181 | | | |
| 6 | ID NO: | ID NO: 1265) | | | | |
| (21 mer) | 1264) | | | | | |

*NCBI Reference Sequence NC_000011, the coordinates are reported using the One-based coordinate system, “Homo sapiens chromosome 11, GRCh38.p12 Primary Assembly,” (Version NC_000011.10).
^{#}Expected cleavage sites based on Zetsche et al, 2015, coordinates are reported using zero-based coordinates.

TABLE 23
Cpf1 HBG2 targeting domains and expected cleavage sites

| | gRNA | | Targeting | Expected | | Targeting |
|---|---|---|---|---|---|---|
| | Targeting | gRNA | Domain | cleavage site | | Domain |
| gRNA | Domain | Targeting | coordinates | coordinates | | Length |
| ID | (RNA) | Domain (DNA) | at HBG2* | at HBG2^{#} | Strand | |
| HBG1-1 | CCUUGUCAA | CCTTGTCAAG | Chr11: 5254878 | Chr11: 5254897, | + | 20 |
| | GGCUAUUG | GCTATTGGTC | Chr11: 5254898 | Chr11: 5254901 | | |
| | GUC (SEQ ID | (SEQ ID | | | | |
| | NO: 1002) | NO: 1003) | | | | |
| HBG1-1 | CCUUGUCAA | CCTTGTCAAG | Chr11: 5254878 | Chr11: 5254897, | + | 21 |
| 21 mer | GGCUAUUG | GCTATTGGTC | Chr11: 5254899 | Chr11: 5254901 | | |
| | GUCA (SEQ | A (SEQ ID | | | | |
| | ID NO: 1254) | NO: 1255) | | | | |
| HBG1-1 | CCUUGUCAA | CCTTGTCAAG | Chr11: 5254878 | Chr11: 5254897, | + | 22 |
| 22 mer | GGCUAUUG | GCTATTGGTC | Chr11: 5254900 | Chr11: 5254901 | | |
| | GUCAA (SEQ | AA (SEQ ID | | | | |
| | ID NO: 1256) | NO: 1257) | | | | |
| HBG1-1 | CCUUGUCAA | CCTTGTCAAG | Chr11: 5254878 | Chr11: 5254897, | + | 23 |
| 23 mer | GGCUAUUG | GCTATTGGTC | Chr11: 5254901 | Chr11: 5254901 | | |
| | GUCAAG | AAG (SEQ ID | | | | |
| | (SEQ ID | NO: 1259) | | | | |
| | NO: 1258) | | | | | |
| AsCpf1 | AGACAGAU | AGACAGATA | Chr11: 5254947 | Chr11: 5254966 | + | 20 |
| HBG1 | AUUUGCAU | TTTGCATTGA | Chr11: 5254967 | Chr11: 5254970 | | |
| Promoter- | UGAG (SEQ | G (SEQ ID | | | | |
| 1 | ID NO: 1139) | NO: 1140) | | | | |
| AsCpf1 | AGACAGAU | AGACAGATA | Chr11: 5254947 | Chr11: 5254966 | + | 21 |
| HBG1 | AUUUGCAU | TTTGCATTGA | Chr11: 5254968 | Chr11: 5254970 | | |
| Promoter- | UGAGA (SEQ | GA (SEQ ID | | | | |
| 1 | ID NO: 1260) | NO: 1261) | | | | |
| (21 mer) | | | | | | |
| AsCpf1 | CAUUGAGA | CATTGAGAT | Chr11: 5254960 | Chr11: 5254979 | + | 20 |
| HBG1 | UAGUGUGG | AGTGTGGGG | Chr11: 5254980 | Chr11: 5254983 | | |
| Promoter- | GGAA (SEQ | AA | | | | |
| 2 | ID NO: 1141) | (SEQ ID | | | | |
| | | NO: 1142) | | | | |
| AsCpf1 | CAUUGAGA | CATTGAGAT | Chr11: 5254960 | Chr11: 5254979 | + | 21 |
| HBG1 | UAGUGUGG | AGTGTGGGG | Chr11: 5254981 | Chr11: 5254983 | | |
| Promoter- | GGAAG (SEQ | AAG (SEQ ID | | | | |
| 2 | ID NO: 1262) | NO: 1263) | | | | |
| (21 mer) | | | | | | |

*NCBI Reference Sequence NC_000011, the coordinates are reported using the One-based coordinate system, “Homo sapiens chromosome 11, GRCh38.p12 Primary Assembly,” (Version NC_000011.10).
^{#}Expected cleavage sites based on (Zetsche et al, 2015), coordinates are reported using zero-based coordinates.

TABLE 24
gRNA 5′ Extensions

| 5′ extension | | |
|---|---|---|
| Sequence ID | | |
| No: | 5′ extension sequence | 5′ modification |
| 1231 | rCrUrUrUrU | +5 RNA |
| 1232 | rArArGrArCrCrUrUrUrU | +10 RNA |
| 1233 | rArUrGrUrGrUrUrUrUrUrGrUrCrArArArArGrArCrCrUrUrUrU | +25 RNA |
| 1234 | rArGrGrCrCrArGrCrUrUrGrCrCrGrGrUrUrUrUrUrUrArGrUrCrG | +60 RNA |
| | rUrGrCrUrGrCrUrUrCrArUrGrUrGrUrUrUrUrUrGrUrCrArArAr | |
| | ArGrArCrCrUrUrUrU | |
| 1235 | CTTTT | +5 DNA |
| 1236 | AAGACCTTTT | +10 DNA |
| 1237 | ATGTGTTTTTGTCAAAAGACCTTTT | +25 DNA |
| 1238 | AGGCCAGCTTGCCGGTTTTTTAGTCGTGCTGCTTCATGTG | +60 DNA |
| | TTTTTGTCAAAAGACCTTTT | |
| 1239 | TTTTTGTCAAAAGACCTTTT | +20 DNA |
| 1240 | GCTTCATGTGTTTTTGTCAAAAGACCTTTT | +30 DNA |
| 1241 | GCCGGTTTTTTAGTCGTGCTGCTTCATGTGTTTTTGTCAAA | +50 DNA |
| | AGACCTTTT | |
| 1242 | TAGTCGTGCTGCTTCATGTGTTTTTGTCAAAAGACCTTTT | +40 DNA |
| 1243 | C*C*GAAGTTTTCTTCGGTTTT | +20 DNA + 2xPS |
| 1244 | T*T*TTTCCGAAGTTTTCTTCGGTTTT | +25 DNA + 2xPS |
| 1245 | A*A*CGCTTTTTCCGAAGTTTTCTTCGGTTTT | +30 DNA + 2xPS |
| 1246 | G*C*GTTGTTTTCAACGCTTTTTCCGAAGTTTTCTTCGGTT | +41 DNA + 2xPS |
| | TT | |
| 1247 | G*G*CTTCTTTTGAAGCCTTTTTGCGTTGTTTTCAACGCTT | +62 DNA + 2xPS |
| | TTTCCGAAGTTTTCTTCGGTTTT | |
| 1248 | A*T*GTGTTTTTGTCAAAAGACCTTTT | +25 DNA + 2xPS |
| 1249 | AAAAAAAAAAAAAAAAAAAAAAAAA | +25 A |
| 1250 | TTTTTTTTTTTTTTTTTTTTTTTTT | +25 T |
| 1251 | mA*mU*rGrUrGrUrUrUrUrUrGrUrCrArArArArGrArCrCrUrUrU | +25 RNA + 2xPS |
| | rU | |
| 1252 | mA*mA*rArArArArArArArArArArArArArArArArArArArArAr | PolyA RNA + |
| | ArA | 2xPS |
| 1253 | mU*mU*rUrUrUrUrUrUrUrUrUrUrUrUrUrUrUrUrUrUrUrUrUr | PolyU RNA + |
| | UrU | 2xPS |

All bases are in upper case
Lowercase “r” represents RNA, 2′-hydroxy; bases not modified by an “r” are DNA
All bases are linked via standard phosphodiester bonds except as noted:
“*” represents phosphorothioate modification
“PS” represents phosphorothioate modification

TABLE 19
Cpf1 guide RNAs

| | | | | Length of | | |
|---|---|---|---|---|---|---|
| gRNA | | | | crRNA + | Length of | gRNA |
| Sequence | | | | gRNA | gRNA | Targeting |
| SEQ ID | | | | targeting | targeting | Domain |
| NO. | gRNA Sequence | 5′ mod.** | 3′ mod. | domain | domain | (RNA) |
| 1022 | rUrArArUrUrUrCrUr | — | — | 40 | 20 | CCUUGUCAA |
| | ArCrUrCrUrUrGrUrA | | | | | GGCUAUUGG |
| | rGrArUrCrCrUrUrGr | | | | | UC (SEQ ID |
| | UrCrArArGrGrCrUrA | | | | | NO: 1002) |
| | rUrUrGrGrUrC | | | | | |
| 1023 | rUrArArUrUrUrCrUr | — | 1xPS2- | 41 | 21 | CCUUGUCAA |
| | ArCrUrCrUrUrGrUrA | | OMe + | | | GGCUAUUGG |
| | rGrArUrCrCrUrUrGr | | 1xOMe | | | UCA (SEQ ID |
| | UrCrArArGrGrCrUrA | | | | | NO: 1254) |
| | rUrUrGrGrUmC/PS2/ | | | | | |
| | mA | | | | | |
| 1041 | rUrArArUrUrUrCrUr | — | 1xPS2- | 40 | 20 | CCUUGUCAA |
| | ArCrUrCrUrUrGrUrA | | OMe + | | | GGCUAUUGG |
| | rGrArUrCrCrUrUrGr | | 1xOMe | | | UC (SEQ ID |
| | UrCrArArGrGrCrUrA | | | | | NO: 1002) |
| | rUrUrGrGmU/PS2/m | | | | | |
| | C | | | | | |
| 1042 | rCrUrUrUrUrUrArAr | +5 RNA | — | 45 | 20 | CCUUGUCAA |
| | UrUrUrCrUrArCrUrC | | | | | GGCUAUUGG |
| | rUrUrGrUrArGrArUr | | | | | UC (SEQ ID |
| | CrCrUrUrGrUrCrArA | | | | | NO: 1002) |
| | rGrGrCrUrArUrUrGr | | | | | |
| | GrUrC | | | | | |
| 1043 | rArArGrArCrCrUrUr | +10 RNA | — | 50 | 20 | CCUUGUCAA |
| | UrUrUrArArUrUrUrC | | | | | GGCUAUUGG |
| | rUrArCrUrCrUrUrGr | | | | | UC (SEQ ID |
| | UrArGrArUrCrCrUrU | | | | | NO: 1002) |
| | rGrUrCrArArGrGrCr | | | | | |
| | UrArUrUrGrGrUrC | | | | | |
| 1044 | rArUrGrUrGrUrUrUr | +25 RNA | — | 65 | 20 | CCUUGUCAA |
| | UrUrGrUrCrArArArA | | | | | GGCUAUUGG |
| | rGrArCrCrUrUrUrUr | | | | | UC (SEQ ID |
| | UrArArUrUrUrCrUrA | | | | | NO: 1002) |
| | rCrUrCrUrUrGrUrAr | | | | | |
| | GrArUrCrCrUrUrGrU | | | | | |
| | rCrArArGrGrCrUrAr | | | | | |
| | UrUrGrGrUrC | | | | | |
| 1045 | rArGrGrCrCrArGrCr | +60 RNA | — | 100 | 20 | CCUUGUCAA |
| | UrUrGrCrCrGrGrUrU | | | | | GGCUAUUGG |
| | rUrUrUrUrArGrUrCr | | | | | UC (SEQ ID |
| | GrUrGrCrUrGrCrUrU | | | | | NO: 1002) |
| | rCrArUrGrUrGrUrUr | | | | | |
| | UrUrUrGrUrCrArArA | | | | | |
| | rArGrArCrCrUrUrUr | | | | | |
| | UrUrArArUrUrUrCrU | | | | | |
| | rArCrUrCrUrUrGrUr | | | | | |
| | ArGrArUrCrCrUrUrG | | | | | |
| | rUrCrArArGrGrCrUr | | | | | |
| | ArUrUrGrGrUrC | | | | | |
| 1046 | CTTTTrUrArArUrUr | +5 DNA | — | 45 | 20 | CCUUGUCAA |
| | UrCrUrArCrUrCrUrU | | | | | GGCUAUUGG |
| | rGrUrArGrArUrCrCr | | | | | UC (SEQ ID |
| | UrUrGrUrCrArArGrG | | | | | NO: 1002) |
| | rCrUrArUrUrGrGrUr | | | | | |
| | C | | | | | |
| 1047 | AAGACCTTTTrUrAr | +10 DNA | — | 50 | 20 | CCUUGUCAA |
| | ArUrUrUrCrUrArCrU | | | | | GGCUAUUGG |
| | rCrUrUrGrUrArGrAr | | | | | UC (SEQ ID |
| | UrCrCrUrUrGrUrCrA | | | | | NO: 1002) |
| | rArGrGrCrUrArUrUr | | | | | |
| | GrGrUrC | | | | | |
| 1048 | ATGTGTTTTTGTCA | +25 DNA | — | 65 | 20 | CCUUGUCAA |
| | AAAGACCTTTTrUr | | | | | GGCUAUUGG |
| | ArArUrUrUrCrUrArC | | | | | UC (SEQ ID |
| | rUrCrUrUrGrUrArGr | | | | | NO: 1002) |
| | ArUrCrCrUrUrGrUrC | | | | | |
| | rArArGrGrCrUrArUr | | | | | |
| | UrGrGrUrC | | | | | |
| 1049 | AGGCCAGCTTGCC | +60 DNA | — | 100 | 20 | CCUUGUCAA |
| | GGTTTTTTAGTCGT | | | | | GGCUAUUGG |
| | GCTGCTTCATGTG | | | | | UC (SEQ ID |
| | TTTTTGTCAAAAG | | | | | NO: 1002) |
| | ACCTTTTrUrArArUr | | | | | |
| | UrUrCrUrArCrUrCrU | | | | | |
| | rUrGrUrArGrArUrCr | | | | | |
| | CrUrUrGrUrCrArArG | | | | | |
| | rGrCrUrArUrUrGrGr | | | | | |
| | UrC | | | | | |
| 1050 | ATGTGTTTTTGTCA | +25 DNA | 1xPS2- | 66 | 21 | CCUUGUCAA |
| | AAAGACCTTTTrUr | | OMe + | | | GGCUAUUGG |
| | ArArUrUrUrCrUrArC | | 1xOMe | | | UCA (SEQ ID |
| | rUrCrUrUrGrUrArGr | | | | | NO: 1254) |
| | ArUrCrCrUrUrGrUrC | | | | | |
| | rArArGrGrCrUrArUr | | | | | |
| | UrGrGrUmC/PS2/mA | | | | | |
| 1051 | ATGTGTTTTTGTCA | +25 DNA | 1xPS- | 66 | 21 | CCUUGUCAA |
| | AAAGACCTTTTrUr | | OMe | | | GGCUAUUGG |
| | ArArUrUrUrCrUrArC | | | | | UCA (SEQ ID |
| | rUrCrUrUrGrUrArGr | | | | | NO: 1254) |
| | ArUrCrCrUrUrGrUrC | | | | | |
| | rArArGrGrCrUrArUr | | | | | |
| | UrGrGrUrC*mA | | | | | |
| 1052 | TTTTTGTCAAAAG | +20 DNA | — | 60 | 20 | CCUUGUCAA |
| | ACCTTTTrUrArArUr | | | | | GGCUAUUGG |
| | UrUrCrUrArCrUrCrU | | | | | UC (SEQ ID |
| | rUrGrUrArGrArUrCr | | | | | NO: 1002) |
| | CrUrUrGrUrCrArArG | | | | | |
| | rGrCrUrArUrUrGrGr | | | | | |
| | UrC | | | | | |
| 1053 | GCTTCATGTGTTTT | +30 DNA | — | 70 | 20 | CCUUGUCAA |
| | TGTCAAAAGACCT | | | | | GGCUAUUGG |
| | TTTrUrArArUrUrUrC | | | | | UC (SEQ ID |
| | rUrArCrUrCrUrUrGr | | | | | NO: 1002) |
| | UrArGrArUrCrCrUrU | | | | | |
| | rGrUrCrArArGrGrCr | | | | | |
| | UrArUrUrGrGrUrC | | | | | |
| 1054 | GCCGGTTTTTTAG | +50 DNA | — | 90 | 20 | CCUUGUCAA |
| | TCGTGCTGCTTCA | | | | | GGCUAUUGG |
| | TGTGTTTTTGTCAA | | | | | UC (SEQ ID |
| | AAGACCTTTTrUrAr | | | | | NO: 1002) |
| | ArUrUrUrCrUrArCrU | | | | | |
| | rCrUrUrGrUrArGrAr | | | | | |
| | UrCrCrUrUrGrUrCrA | | | | | |
| | rArGrGrCrUrArUrUr | | | | | |
| | GrGrUrC | | | | | |
| 1055 | TAGTCGTGCTGCT | +40 DNA | — | 80 | 20 | CCUUGUCAA |
| | TCATGTGTTTTTGT | | | | | GGCUAUUGG |
| | CAAAAGACCTTTTr | | | | | UC (SEQ ID |
| | UrArArUrUrUrCrUrA | | | | | NO: 1002) |
| | rCrUrCrUrUrGrUrAr | | | | | |
| | GrArUrCrCrUrUrGrU | | | | | |
| | rCrArArGrGrCrUrAr | | | | | |
| | UrUrGrGrUrC | | | | | |
| 1056 | C*C*GAAGTTTTCT | +20 DNA + | — | 60 | 20 | CCUUGUCAA |
| | TCGGTTTTrUrArAr | 2xPS | | | | GGCUAUUGG |
| | UrUrUrCrUrArCrUrC | | | | | UC (SEQ ID |
| | rUrUrGrUrArGrArUr | | | | | NO: 1002) |
| | CrCrUrUrGrUrCrArA | | | | | |
| | rGrGrCrUrArUrUrGr | | | | | |
| | GrUrC | | | | | |
| 1057 | T*T*TTTCCGAAGT | +25 DNA + | — | 65 | 20 | CCUUGUCAA |
| | TTTCTTCGGTTTTr | 2xPS | | | | GGCUAUUGG |
| | UrArArUrUrUrCrUrA | | | | | UC (SEQ ID |
| | rCrUrCrUrUrGrUrAr | | | | | NO: 1002) |
| | GrArUrCrCrUrUrGrU | | | | | |
| | rCrArArGrGrCrUrAr | | | | | |
| | UrUrGrGrUrC | | | | | |
| 1058 | A*A*CGCTTTTTCC | +30 DNA + | — | 70 | 20 | CCUUGUCAA |
| | GAAGTTTTCTTCG | 2xPS | | | | GGCUAUUGG |
| | GTTTTrUrArArUrUr | | | | | UC (SEQ ID |
| | UrCrUrArCrUrCrUrU | | | | | NO: 1002) |
| | rGrUrArGrArUrCrCr | | | | | |
| | UrUrGrUrCrArArGrG | | | | | |
| | rCrUrArUrUrGrGrUr | | | | | |
| | C | | | | | |
| 1059 | G*C*GTTGTTTTCA | +41 DNA + | — | 81 | 20 | CCUUGUCAA |
| | ACGCTTTTTCCGA | 2xPS | | | | GGCUAUUGG |
| | AGTTTTCTTCGGTT | | | | | UC (SEQ ID |
| | TTrUrArArUrUrUrCr | | | | | NO: 1002) |
| | UrArCrUrCrUrUrGrU | | | | | |
| | rArGrArUrCrCrUrUr | | | | | |
| | GrUrCrArArGrGrCrU | | | | | |
| | rArUrUrGrGrUrC | | | | | |
| 1060 | G*G*CTTCTTTTGA | +62 DNA + | — | 102 | 20 | CCUUGUCAA |
| | AGCCTTTTTGCGTT | 2xPS | | | | GGCUAUUGG |
| | GTTTTCAACGCTTT | | | | | UC (SEQ ID |
| | TTCCGAAGTTTTCT | | | | | NO: 1002) |
| | TCGGTTTTrUrArAr | | | | | |
| | UrUrUrCrUrArCrUrC | | | | | |
| | rUrUrGrUrArGrArUr | | | | | |
| | CrCrUrUrGrUrCrArA | | | | | |
| | rGrGrCrUrArUrUrGr | | | | | |
| | GrUrC | | | | | |
| 1061 | mUrArArUrUrUrCrUr | 1xOMe | — | 40 | 20 | CCUUGUCAA |
| | ArCrUrCrUrUrGrUrA | | | | | GGCUAUUGG |
| | rGrArUrCrCrUrUrGr | | | | | UC (SEQ ID |
| | UrCrArArGrGrCrUrA | | | | | NO: 1002) |
| | rUrUrGrGrUrC | | | | | |
| 1062 | mU*rArArUrUrUrCr | 1xPS-OMe | — | 40 | 20 | CCUUGUCAA |
| | UrArCrUrCrUrUrGrU | | | | | GGCUAUUGG |
| | rArGrArUrCrCrUrUr | | | | | UC (SEQ ID |
| | GrUrCrArArGrGrCrU | | | | | NO: 1002) |
| | rArUrUrGrGrUrC | | | | | |
| 1063 | mUmArArUrUrUrCr | 2xOMe | — | 40 | 20 | CCUUGUCAA |
| | UrArCrUrCrUrUrGrU | | | | | GGCUAUUGG |
| | rArGrArUrCrCrUrUr | | | | | UC (SEQ ID |
| | GrUrCrArArGrGrCrU | | | | | NO: 1002) |
| | rArUrUrGrGrUrC | | | | | |
| 1064 | mU*mA*rArUrUrUr | 2xPS-OMe | — | 40 | 20 | CCUUGUCAA |
| | CrUrArCrUrCrUrUrG | | | | | GGCUAUUGG |
| | rUrArGrArUrCrCrUr | | | | | UC (SEQ ID |
| | UrGrUrCrArArGrGrC | | | | | NO: 1002) |
| | rUrArUrUrGrGrUrC | | | | | |
| 1065 | mUmAmArUrUrUrCr | 3xOMe | — | 40 | 20 | CCUUGUCAA |
| | UrArCrUrCrUrUrGrU | | | | | GGCUAUUGG |
| | rArGrArUrCrCrUrUr | | | | | UC (SEQ ID |
| | GrUrCrArArGrGrCrU | | | | | NO: 1002) |
| | rArUrUrGrGrUrC | | | | | |
| 1066 | mU*mA*mA*rUrUrU | 3xPS-OMe | — | 40 | 20 | CCUUGUCAA |
| | rCrUrArCrUrCrUrUr | | | | | GGCUAUUGG |
| | GrUrArGrArUrCrCrU | | | | | UC (SEQ ID |
| | rUrGrUrCrArArGrGr | | | | | NO: 1002) |
| | CrUrArUrUrGrGrUrC | | | | | |
| 1067 | A*T*GTGTTTTTGT | +25 DNA + | — | 65 | 20 | CCUUGUCAA |
| | CAAAAGACCTTTTr | 2xPS | | | | GGCUAUUGG |
| | UrArArUrUrUrCrUrA | | | | | UC (SEQ ID |
| | rCrUrCrUrUrGrUrAr | | | | | NO: 1002) |
| | GrArUrCrCrUrUrGrU | | | | | |
| | rCrArArGrGrCrUrAr | | | | | |
| | UrUrGrGrUrC | | | | | |
| 1068 | A*T*GTGTTTTTGT | +25 DNA + | 1xPS- | 66 | 21 | CCUUGUCAA |
| | CAAAAGACCTTTTr | 2xPS | OMe | | | GGCUAUUGG |
| | UrArArUrUrUrCrUrA | | | | | UCA (SEQ ID |
| | rCrUrCrUrUrGrUrAr | | | | | NO: 1254) |
| | GrArUrCrCrUrUrGrU | | | | | |
| | rCrArArGrGrCrUrAr | | | | | |
| | UrUrGrGrUrC*mA | | | | | |
| 1069 | rUrArArUrUrUrCrUr | — | 1xPS- | 41 | 21 | CCUUGUCAA |
| | ArCrUrCrUrUrGrUrA | | OMe | | | GGCUAUUGG |
| | rGrArUrCrCrUrUrGr | | | | | UCA (SEQ ID |
| | UrCrArArGrGrCrUrA | | | | | NO: 1254) |
| | rUrUrGrGrUrC*mA | | | | | |
| 1070 | rUrArArUrUrUrCrUr | — | 1xPS- | 42 | 21 | CCUUGUCAA |
| | ArCrUrCrUrUrGrUrA | | OMe + | | | GGCUAUUGG |
| | rGrArUrCrCrUrUrGr | | rU | | | UCA (SEQ ID |
| | UrCrArArGrGrCrUrA | | | | | NO: 1254) |
| | rUrUrGrGrUrCmA*r | | | | | |
| | U | | | | | |
| 1071 | rUrArArUrUrUrCrUr | — | rU | 41 | 20 | CCUUGUCAA |
| | ArCrUrCrUrUrGrUrA | | | | | GGCUAUUGG |
| | rGrArUrCrCrUrUrGr | | | | | UC (SEQ ID |
| | UrCrArArGrGrCrUrA | | | | | NO: 1002) |
| | rUrUrGrGrUrCrU | | | | | |
| 1072 | rUrArArUrUrUrCrUr | — | rU | 42 | 21 | CCUUGUCAA |
| | ArCrUrCrUrUrGrUrA | | | | | GGCUAUUGG |
| | rGrArUrCrCrUrUrGr | | | | | UCA (SEQ ID |
| | UrCrArArGrGrCrUrA | | | | | NO: 1254) |
| | rUrUrGrGrUrCrArU | | | | | |
| 1073 | rUrArArUrUrUrCrUr | — | rU | 44 | 23 | CCUUGUCAA |
| | ArCrUrCrUrUrGrUrA | | | | | GGCUAUUGG |
| | rGrArUrCrCrUrUrGr | | | | | UCAAG (SEQ |
| | UrCrArArGrGrCrUrA | | | | | ID NO: 1258) |
| | rUrUrGrGrUrCrArAr | | | | | |
| | GrU | | | | | |
| 1074 | A*T*GTGTTTTTGT | +25 DNA + | rU | 66 | 20 | CCUUGUCAA |
| | CAAAAGACCTTTTr | 2xPS | | | | GGCUAUUGG |
| | UrArArUrUrUrCrUrA | | | | | UC (SEQ ID |
| | rCrUrCrUrUrGrUrAr | | | | | NO: 1002) |
| | GrArUrCrCrUrUrGrU | | | | | |
| | rCrArArGrGrCrUrAr | | | | | |
| | UrUrGrGrUrCrU | | | | | |
| 1075 | A*T*GTGTTTTTGT | +25 DNA + | rU | 69 | 23 | CCUUGUCAA |
| | CAAAAGACCTTTTr | 2xPS | | | | GGCUAUUGG |
| | UrArArUrUrUrCrUrA | | | | | UCAAG (SEQ |
| | rCrUrCrUrUrGrUrAr | | | | | ID NO: 1258) |
| | GrArUrCrCrUrUrGrU | | | | | |
| | rCrArArGrGrCrUrAr | | | | | |
| | UrUrGrGrUrCrArArG | | | | | |
| | rU | | | | | |
| 1076 | rUrArArUrUrUrCrUr | — | — | 41 | 21 | CCUUGUCAA |
| | ArCrUrCrUrUrGrUrA | | | | | GGCUAUUGG |
| | rGrArUrCrCrUrUrGr | | | | | UCA (SEQ ID |
| | UrCrArArGrGrCrUrA | | | | | NO: 1254) |
| | rUrUrGrGrUrCrA | | | | | |
| 1077 | rUrArArUrUrUrCrUr | — | — | 43 | 23 | CCUUGUCAA |
| | ArCrUrCrUrUrGrUrA | | | | | GGCUAUUGG |
| | rGrArUrCrCrUrUrGr | | | | | UCAAG (SEQ |
| | UrCrArArGrGrCrUrA | | | | | ID NO: 1258) |
| | rUrUrGrGrUrCrArAr | | | | | |
| | G | | | | | |
| 1078 | A*T*GTGTTTTTGT | +25 DNA + | — | 68 | 23 | CCUUGUCAA |
| | CAAAAGACCTTTTr | 2xPS | | | | GGCUAUUGG |
| | UrArArUrUrUrCrUrA | | | | | UCAAG (SEQ |
| | rCrUrCrUrUrGrUrAr | | | | | ID NO: 1258) |
| | GrArUrCrCrUrUrGrU | | | | | |
| | rCrArArGrGrCrUrAr | | | | | |
| | UrUrGrGrUrCrArArG | | | | | |
| 1079 | rUrArArUrUrUrCrUr | — | 4xrU | 44 | 20 | CCUUGUCAA |
| | ArCrUrCrUrUrGrUrA | | | | | GGCUAUUGG |
| | rGrArUrCrCrUrUrGr | | | | | UC (SEQ ID |
| | UrCrArArGrGrCrUrA | | | | | NO: 1002) |
| | rUrUrGrGrUrCrUrUr | | | | | |
| | UrU | | | | | |
| 1080 | rUrArArUrUrUrCrUr | — | 3xPS- | 44 | 20 | CCUUGUCAA |
| | ArCrUrCrUrUrGrUrA | | OMe-U + | | | GGCUAUUGG |
| | rGrArUrCrCrUrUrGr | | rU | | | UC (SEQ ID |
| | UrCrArArGrGrCrUrA | | | | | NO: 1002) |
| | rUrUrGrGrUrCmU*m | | | | | |
| | U*mU*rU | | | | | |
| 1081 | A*T*GTGTTTTTGT | +25 DNA + | 4xrU | 69 | 20 | CCUUGUCAA |
| | CAAAAGACCTTTTr | 2xPS | | | | GGCUAUUGG |
| | UrArArUrUrUrCrUrA | | | | | UC (SEQ ID |
| | rCrUrCrUrUrGrUrAr | | | | | NO: 1002) |
| | GrArUrCrCrUrUrGrU | | | | | |
| | rCrArArGrGrCrUrAr | | | | | |
| | UrUrGrGrUrCrUrUrU | | | | | |
| | rU | | | | | |
| 1082 | AAAAAAAAAAAA | +25 A | 1xPS- | 66 | 21 | CCUUGUCAA |
| | AAAAAAAAAAAA | | OMe | | | GGCUAUUGG |
| | ArUrArArUrUrUrCrU | | | | | UCA (SEQ ID |
| | rArCrUrCrUrUrGrUr | | | | | |
| | ArGrArUrCrCrUrUrG | | | | | NO: 1254) |
| | rUrCrArArGrGrCrUr | | | | | |
| | ArUrUrGrGrUrC*mA | | | | | |
| 1083 | TTTTTTTTTTTTTTT | +25 T | 1xPS- | 66 | 21 | CCUUGUCAA |
| | TTTTTTTTTTrUrAr | | OMe | | | GGCUAUUGG |
| | ArUrUrUrCrUrArCrU | | | | | UCA (SEQ ID |
| | rCrUrUrGrUrArGrAr | | | | | NO: 1254) |
| | UrCrCrUrUrGrUrCrA | | | | | |
| | rArGrGrCrUrArUrUr | | | | | |
| | GrGrUrC*mA | | | | | |
| 1084 | C*C*GAAGTTTTCT | +20 DNA + | 1xPS- | 61 | 21 | CCUUGUCAA |
| | TCGGTTTTrUrArAr | 2xPS | OMe | | | GGCUAUUGG |
| | UrUrUrCrUrArCrUrC | | | | | UCA (SEQ ID |
| | rUrUrGrUrArGrArUr | | | | | NO: 1254) |
| | CrCrUrUrGrUrCrArA | | | | | |
| | rGrGrCrUrArUrUrGr | | | | | |
| | GrUrC*mA | | | | | |
| 1085 | rUrArArUrUrUrCrUr | — | 1xPS- | 41 | 21 | AGACAGAUA |
| | ArCrUrCrUrUrGrUrA | | OMe | | | UUUGCAUUG |
| | rGrArUrArGrArCrAr | | | | | AGA (SEQ ID |
| | GrArUrArUrUrUrGrC | | | | | NO: 1260) |
| | rArUrUrGrArG*mA | | | | | |
| 1086 | ATGTGTTTTTGTCA | +25 DNA | 1xPS- | 66 | 21 | AGACAGAUA |
| | AAAGACCTTTTrUr | | OMe | | | UUUGCAUUG |
| | ArArUrUrUrCrUrArC | | | | | AGA (SEQ ID |
| | rUrCrUrUrGrUrArGr | | | | | NO: 1260) |
| | ArUrArGrArCrArGrA | | | | | |
| | rUrArUrUrUrGrCrAr | | | | | |
| | UrUrGrArG*mA | | | | | |
| 1087 | C*C*GAAGTTTTCT | +20 DNA + | 1xPS- | 61 | 21 | AGACAGAUA |
| | TCGGTTTTrUrArAr | 2xPS | OMe | | | UUUGCAUUG |
| | UrUrUrCrUrArCrUrC | | | | | AGA (SEQ ID |
| | rUrUrGrUrArGrArUr | | | | | NO: 1260) |
| | ArGrArCrArGrArUrA | | | | | |
| | rUrUrUrGrCrArUrUG | | | | | |
| | rArG*mA | | | | | |
| 1088 | rUrArArUrUrUrCrUr | — | 1xPS- | 41 | 21 | CAUUGAGAU |
| | ArCrUrCrUrUrGrUrA | | OMe | | | AGUGUGGGG |
| | rGrArUrCrArUrUrGr | | | | | AAG (SEQ ID |
| | ArGrArUrArGrUrGrU | | | | | NO: 1262) |
| | rGrGrGrGrArA*mG | | | | | |
| 1089 | ATGTGTTTTTGTCA | +25 DNA | 1xPS- | 66 | 21 | CAUUGAGAU |
| | AAAGACCTTTTrUr | | OMe | | | AGUGUGGGG |
| | ArArUrUrUrCrUrArC | | | | | AAG (SEQ ID |
| | rUrCrUrUrGrUrArGr | | | | | NO: 1262) |
| | ArUrCrArUrUrGrArG | | | | | |
| | rArUrArGrUrGrUrGr | | | | | |
| | GrGrGrArA*mG | | | | | |
| 1090 | C*C*GAAGTTTTCT | +20 DNA + | 1xPS- | 61 | 21 | CAUUGAGAU |
| | TCGGTTTTrUrArAr | 2xPS | OMe | | | AGUGUGGGG |
| | UrUrUrCrUrArCrUrC | | | | | AAG (SEQ ID |
| | rUrUrGrUrArGrArUr | | | | | NO: 1262) |
| | CrArUrUrGrArGrArU | | | | | |
| | rArGrUrGrUrGrGrGr | | | | | |
| | GrArA*mG | | | | | |
| 1091 | rUrArArUrUrUrCrUr | — | 1xPS- | 41 | 21 | CUUCUCCCAU |
| | ArCrUrCrUrUrGrUrA | | OMe | | | CAUAGAGGA |
| | rGrArUrCrUrUrCrUr | | | | | UA (SEQ ID |
| | CrCrCrArUrCrArUrA | | | | | NO: 1264) |
| | rGrArGrGrArU*mA | | | | | |
| 1092 | ATGTGTTTTTGTCA | +25 DNA | 1xPS- | 66 | 21 | CUUCUCCCAU |
| | AAAGACCTTTTrUr | | OMe | | | CAUAGAGGA |
| | ArArUrUrUrCrUrArC | | | | | UA (SEQ ID |
| | rUrCrUrUrGrUrArGr | | | | | NO: 1264) |
| | ArUrCrUrUrCrUrCrC | | | | | |
| | rCrArUrCrArUrArGr | | | | | |
| | ArGrGrArU*mA | | | | | |
| 1093 | C*C*GAAGTTTTCT | +20 DNA + | 1xPS- | 61 | 21 | CUUCUCCCAU |
| | TCGGTTTTrUrArAr | 2xPS | OMe | | | CAUAGAGGA |
| | UrUrUrCrUrArCrUrC | | | | | UA (SEQ ID |
| | rUrUrGrUrArGrArUr | | | | | NO: 1264) |
| | CrUrUrCrUrCrCrCrA | | | | | |
| | rUrCrArUrArGrArGr | | | | | |
| | GrArU*mA | | | | | |
| 1098 | A*T*GTGTTTTTGT | +25 DNA + | 1xPS- | 67 | 21 | CCUUGUCAA |
| | CAAAAGACCTTTTr | 2xPS | OMe + | | | GGCUAUUGG |
| | UrArArUrUrUrCrUrA | | rU | | | UCA (SEQ ID |
| | rCrUrCrUrUrGrUrAr | | | | | NO: 1254) |
| | GrArUrCrCrUrUrGrU | | | | | |
| | rCrArArGrGrCrUrAr | | | | | |
| | UrUrGrGrUrCmA*rU | | | | | |
| 1099 | A*T*GTGTTTTTGT | +25 DNA + | 2xPS- | 68 | 22 | CCUUGUCAA |
| | CAAAAGACCTTTTr | 2xPS | OMe + | | | GGCUAUUGG |
| | UrArArUrUrUrCrUrA | | rU | | | UCAA (SEQ ID |
| | rCrUrCrUrUrGrUrAr | | | | | NO: 1256) |
| | GrArUrCrCrUrUrGrU | | | | | |
| | rCrArArGrGrCrUrAr | | | | | |
| | UrUrGrGrUrCmA*m | | | | | |
| | A*rU | | | | | |
| 1100 | A*T*GTGTTTTTGT | +25 DNA + | 1xPS- | 66 | 20 | CCUUGUCAA |
| | CAAAAGACCTTTTr | 2xPS | OMe + | | | GGCUAUUGG |
| | UrArArUrUrUrCrUrA | | rU | | | UC (SEQ ID |
| | rCrUrCrUrUrGrUrAr | | | | | NO: 1002) |
| | GrArUrCrCrUrUrGrU | | | | | |
| | rCrArArGrGrCrUrAr | | | | | |
| | UrUrGrGrUmC*rU | | | | | |
| 1101 | A*T*GTGTTTTTGT | +25 DNA + | 1xPS- | 65 | 20 | CCUUGUCAA |
| | CAAAAGACCTTTTr | 2xPS | OMe | | | GGCUAUUGG |
| | UrArArUrUrUrCrUrA | | | | | UC (SEQ ID |
| | rCrUrCrUrUrGrUrAr | | | | | NO: 1002) |
| | GrArUrCrCrUrUrGrU | | | | | |
| | rCrArArGrGrCrUrAr | | | | | |
| | UrUrGrGrU*mC | | | | | |
| 1102 | A*T*GTGTTTTTGT | +25 DNA + | 2xPS- | 67 | 22 | CCUUGUCAA |
| | CAAAAGACCTTTTr | 2xPS | OMe | | | GGCUAUUGG |
| | UrArArUrUrUrCrUrA | | | | | UCAA (SEQ ID |
| | rCrUrCrUrUrGrUrAr | | | | | NO: 1256) |
| | GrArUrCrCrUrUrGrU | | | | | |
| | rCrArArGrGrCrUrAr | | | | | |
| | UrUrGrGrUrC*mA* | | | | | |
| | mA | | | | | |
| 1103 | mA*mU*rGrUrGrUr | +25 RNA + | 1xPS- | 66 | 21 | CCUUGUCAA |
| | UrUrUrUrGrUrCrArA | 2xPS | OMe | | | GGCUAUUGG |
| | rArArGrArCrCrUrUr | | | | | UCA (SEQ ID |
| | UrUrUrArArUrUrUrC | | | | | NO: 1254) |
| | rUrArCrUrCrUrUrGr | | | | | |
| | UrArGrArUrCrCrUrU | | | | | |
| | rGrUrCrArArGrGrCr | | | | | |
| | UrArUrUrGrGrUrC* | | | | | |
| | mA | | | | | |
| 1104 | mA*mA*rArArArAr | PolyA RNA | 1xPS- | 66 | 21 | CCUUGUCAA |
| | ArArArArArArArArA | + 2xPS | OMe | | | GGCUAUUGG |
| | rArArArArArArArAr | | | | | UCA (SEQ ID |
| | ArArUrArArUrUrUrC | | | | | NO: 1254) |
| | rUrArCrUrCrUrUrGr | | | | | |
| | UrArGrArUrCrCrUrU | | | | | |
| | rGrUrCrArArGrGrCr | | | | | |
| | UrArUrUrGrGrUrC* | | | | | |
| | mA | | | | | |
| 1105 | mU*mU*rUrUrUrUr | PolyU RNA | 1xPS- | 66 | 21 | CCUUGUCAA |
| | UrUrUrUrUrUrUrUrU | + 2xPS | OMe | | | GGCUAUUGG |
| | rUrUrUrUrUrUrUrUr | | | | | UCA (SEQ ID |
| | UrUrUrArArUrUrUrC | | | | | NO: 1254) |
| | rUrArCrUrCrUrUrGr | | | | | |
| | UrArGrArUrCrCrUrU | | | | | |
| | rGrUrCrArArGrGrCr | | | | | |
| | UrArUrUrGrGrUrC* | | | | | |
| | mA | | | | | |

All bases are in upper case
Lowercase “r” represents RNA, 2′-hydroxy; bases not modified by an “r” are DNA
All bases are linked via standard phosphodiester bonds except as noted:
“*” represents phosphorothioate modification
“PS” represents phosphorothioate modification
“PS2” represents phosphorodithioate modification
“OMe” represents a 2′-o-methyl modification
“m” represents a 2′-o-methyl modification
**Table 24 provides a listing of the sequences of the gRNA 5′ extensions

TABLE 31
Sp35 RNP and RNP58 Indels

| | “% in | “% in | | | | |
|---|---|---|---|---|---|---|
| | indel” | indel” | | Genomic | Genomic | HBG1 and |
| | SpCas9 | Cpf1 | | Coordinates | Coordinates | HBG2 |
| Indel_id | (Sp35 RNP) | (RNP58) | MMEJ | at HBG1 | at HBG2 | Position |
| 159_-18_NA | 0.013503714 | 0.185309532 | True | chr11: 5,249,961- | chr11: 5,254,885- | HBG1/2 c.-104 |
| | | | | 5,249,978 | 5,254,902 | to -121 |
| 165_-6_NA | 0.011778239 | 0.050633257 | False | chr11: 5,249,967- | chr11: 5,254,891- | HBG1/2 c.-110 |
| | | | | 5,249,972 | 5,254,896 | to -115 |
| 167_-4_NA | 0.046087674 | 0.049159297 | False | chr11: 5,249,969- | chr11: 5,254,893- | HBG1/2 c.-112 |
| | | | | 5,249,972 | 5,254,896 | to -115 |
| 168_-3_NA | 0.072269874 | 0.044737417 | False | chr11: 5,249,970- | chr11: 5,254,894- | HBG1/2 c.-113 |
| | | | | 5,249,972 | 5,254,896 | to -115 |
| 157_-13_NA | 0.318812673 | 0.033628125 | True | chr11: 5,249,959- | chr11: 5,254,883- | HBG1/2 c.-102 |
| | | | | 5,249,971 | 5,254,895 | to -114 |
| 166_-7_NA | 0.001100303 | 0.027923354 | False | chr11: 5,249,968- | chr11: 5,254,892- | HBG1/2 c.-111 |
| | | | | 5,249,974 | 5,254,898 | to -117 |
| 166_-5_NA | 0.007076946 | 0.025412163 | False | chr11: 5,249,968- | chr11: 5,254,892- | HBG1/2 c.-111 |
| | | | | 5,249,972 | 5,254,896 | to -115 |
| 169_-5_NA | 0.000775213 | 0.024948138 | False | chr11: 5,249,971- | chr11: 5,254,895- | HBG1/2 c.-114 |
| | | | | 5,249,975 | 5,254,899 | to -118 |
| 168_-5_NA | 0.000475131 | 0.018288023 | False | chr11: 5,249,970- | chr11: 5,254,894- | HBG1/2 c.-113 |
| | | | | 5,249,974 | 5,254,898 | to -117 |
| 169_-4_NA | 0.001400385 | 0.017605634 | False | chr11: 5,249,971- | chr11: 5,254,895- | HBG1/2 c.-114 |
| | | | | 5,249,974 | 5,254,898 | to -117 |
| 167_-5_NA | 0.000700193 | 0.014548531 | False | chr11: 5,249,969- | chr11: 5,254,893- | HBG1/2 c.-112 |
| | | | | 5,249,973 | 5,254,897 | to -116 |
| 164_-8_NA | 0.002275626 | 0.01375696 | False | chr11: 5,249,966- | chr11: 5,254,890- | HBG1/2 c.-109 |
| | | | | 5,249,973 | 5,254,897 | to -116 |
| 166_-8_NA | 0.000625172 | 0.011982749 | False | chr11: 5,249,968- | chr11: 5,254,892- | HBG1/2 c.-111 |
| | | | | 5,249,975 | 5,254,899 | to -118 |
| 166_-12_NA | 0.000300083 | 0.01031772 | False | chr11: 5,249,968- | chr11: 5,254,892- | HBG1/2 c.-111 |
| | | | | 5,249,979 | 5,254,903 | to -122 |
| 169_-2_NA | 0.084173148 | 0.010263129 | False | chr11: 5,249,971- | chr11: 5,254,895- | HBG1/2 c.-114 |
| | | | | 5,249,972 | 5,254,896 | to -115 |
| 167_-6_NA | 0.000500138 | 0.008952942 | False | chr11: 5,249,969- | chr11: 5,254,893- | HBG1/2 c.-112 |
| | | | | 5,249,974 | 5,254,898 | to -117 |
| 157_-18_NA | 0.001650454 | 0.008024894 | False | chr11: 5,249,959- | chr11: 5,254,883- | HBG1/2 c.-102 |
| | | | | 5,249,976 | 5,254,900 | to -119 |
| 166_-13_NA | 0.012028308 | 0.006960367 | False | chr11: 5,249,968- | chr11: 5,254,892- | HBG1/2 c.-111 |
| | | | | 5,249,980 | 5,254,904 | to -123 |
| 168_-10_NA | 0.000050014 | 0.006359865 | False | chr11: 5,249,970- | chr11: 5,254,894- | HBG1/2 c.-113 |
| | | | | 5,249,979 | 5,254,903 | to -122 |
| 162_-22_NA | 0.001050289 | 0.006086909 | True | chr11: 5,249,964- | chr11: 5,254,888- | HBG1/2 c.-107 |
| | | | | 5,249,985 | 5,254,909 | to -128 |
| 169_-8_NA | 0.000100028 | 0.00589584 | False | chr11: 5,249,971- | chr11: 5,254,895- | HBG1/2 c.-114 |
| | | | | 5,249,978 | 5,254,902 | to -121 |
| 169_-9_NA | 0.000050014 | 0.005868545 | False | chr11: 5,249,971- | chr11: 5,254,895- | HBG1/2 c.-114 |
| | | | | 5,249,979 | 5,254,903 | to -122 |
| 165_-7_NA | 0.000425117 | 0.005704771 | False | chr11: 5,249,967- | chr11: 5,254,891- | HBG1/2 c.-110 |
| | | | | 5,249,973 | 5,254,897 | to -116 |
| 169_-7_NA | 0.000325089 | 0.005677476 | False | chr11: 5,249,971- | chr11: 5,254,895- | HBG1/2 c.-114 |
| | | | | 5,249,977 | 5,254,901 | to -120 |
| 168_-8_NA | 0.000200055 | 0.005349929 | False | chr11: 5,249,970- | chr11: 5,254,894- | HBG1/2 c.-113 |
| | | | | 5,249,977 | 5,254,901 | to -120 |
| 170_-2_NA | 0.001025282 | 0.00515886 | False | chr11: 5,249,972- | chr11: 5,254,896- | HBG1/2 c.-115 |
| | | | | 5,249,973 | 5,254,897 | to -116 |
| 168_-9_NA | 0 | 0.005022382 | False | chr11: 5,249,970- | chr11: 5,254,894- | HBG1/2 c.-113 |
| | | | | 5,249,978 | 5,254,902 | to -121 |
| 168_-6_NA | 0.000150041 | 0.004967791 | False | chr11: 5,249,970- | chr11: 5,254,894- | HBG1/2 c.-113 |
| | | | | 5,249,975 | 5,254,899 | to -118 |
| 169_-10_NA | 0.000050014 | 0.004858609 | False | chr11: 5,249,971- | chr11: 5,254,895- | HBG1/2 c.-114 |
| | | | | 5,249,980 | 5,254,904 | to -123 |
| 166_-11_NA | 0.000025007 | 0.004749427 | False | chr11: 5,249,968- | chr11: 5,254,892- | HBG1/2 c.-111 |
| | | | | 5,249,978 | 5,254,902 | to -121 |
| 164_-23_NA | 0.000125034 | 0.004722131 | False | chr11: 5,249,966- | chr11: 5,254,890- | HBG1/2 c.-109 |
| | | | | 5,249,988 | 5,254,912 | to -131 |
| 166_-10_NA | 0.000050014 | 0.00417622 | False | chr11: 5,249,968- | chr11: 5,254,892- | HBG1/2 c.-111 |
| | | | | 5,249,977 | 5,254,901 | to -120 |
| 167_-11_NA | 0 | 0.004039742 | False | chr11: 5,249,969- | chr11: 5,254,893- | HBG1/2 c.-112 |
| | | | | 5,249,979 | 5,254,903 | to -122 |
| 168_-7_NA | 0.000125034 | 0.003957856 | False | chr11: 5,249,970- | chr11: 5,254,894- | HBG1/2 c.-113 |
| | | | | 5,249,976 | 5,254,900 | to -119 |
| 168_-11_NA | 0.000125034 | 0.003794082 | False | chr11: 5,249,970- | chr11: 5,254,894- | HBG1/2 c.-113 |
| | | | | 5,249,980 | 5,254,904 | to -123 |
| 166_-9_NA | 0.000025007 | 0.003766787 | False | chr11: 5,249,968- | chr11: 5,254,892- | HBG1/2 c.-111 |
| | | | | 5,249,976 | 5,254,900 | to -119 |
| 167_-1_NA | 0.000975268 | 0.0036849 | False | chr11: 5,249,969- | chr11: 5,254,893- | HBG1/2 c.-112 |
| | | | | 5,249,969 | 5,254,893 | to -112 |
| 168_-2_NA | 0.003325915 | 0.003575718 | False | chr11: 5,249,970- | chr11: 5,254,894- | HBG1/2 c.-113 |
| | | | | 5,249,971 | 5,254,895 | to - 114 |
| 167_-9_NA | 0.000075021 | 0.003521127 | False | chr11: 5,249,969- | chr11: 5,254,893- | HBG1/2 c.-112 |
| | | | | 5,249,977 | 5,254,901 | to -120 |
| 168_-12_NA | 0.000200055 | 0.003521127 | False | chr11: 5,249,970- | chr11: 5,254,894- | HBG1/2 c.-113 |
| | | | | 5,249,981 | 5,254,905 | to - 124 |
| 166_-15_NA | 0.000050014 | 0.003493831 | False | chr11: 5,249,968- | chr11: 5,254,892- | HBG1/2 c.-111 |
| | | | | 5,249,982 | 5,254,906 | to -125 |
| 162_-7_NA | 0.005901623 | 0.00343924 | True | chr11: 5,249,964- | chr11: 5,254,888- | HBG1/2 c.-107 |
| | | | | 5,249,970 | 5,254,894 | to -113 |
| 169_-12_NA | 0.001775488 | 0.003384649 | False | chr11: 5,249,971- | chr11: 5,254,895- | HBG1/2 c.-114 |
| | | | | 5,249,982 | 5,254,906 | to -125 |
| 168_-13_NA | 0.001000275 | 0.003357353 | False | chr11: 5,249,970- | chr11: 5,254,894- | HBG1/2 c.-113 |
| | | | | 5,249,982 | 5,254,906 | to -125 |
| 166_-4_NA | 0.001000275 | 0.003111693 | False | chr11: 5,249,968- | chr11: 5,254,892- | HBG1/2 c.-111 |
| | | | | 5,249,971 | 5,254,895 | to -114 |
| 167_-10_NA | 0.000050014 | 0.003057102 | False | chr11: 5,249,969- | chr11: 5,254,893- | HBG1/2 c.-112 |
| | | | | 5,249,978 | 5,254,902 | to -121 |
| 169_-13_NA | 0.001500413 | 0.002756851 | False | chr11: 5,249,971- | chr11: 5,254,895- | HBG1/2 c.-114 |
| | | | | 5,249,983 | 5,254,907 | to -126 |
| 157_-19_NA | 0.000075021 | 0.002483896 | False | chr11: 5,249,959- | chr11: 5,254,883- | HBG1/2 c.-102 |
| | | | | 5,249,977 | 5,254,901 | to -120 |
| 166_-14_NA | 0.000025007 | 0.0024566 | False | chr11: 5,249,968- | chr11: 5,254,892- | HBG1/2 c.-111 |
| | | | | 5,249,981 | 5,254,905 | to -124 |
| 158_-14_NA | 0.000050014 | 0.002429305 | False | chr11: 5,249,960- | chr11: 5,254,884- | HBG1/2 c.-103 |
| | | | | 5,249,973 | 5,254,897 | to -116 |
| 167_-3_NA | 0.002700743 | 0.002402009 | False | chr11: 5,249,969- | chr11: 5,254,893- | HBG1/2 c.-112 |
| | | | | 5,249,971 | 5,254,895 | to -114 |
| 163_-9_NA | 0.000200055 | 0.002265531 | False | chr11: 5,249,965- | chr11: 5,254,889- | HBG1/2 c.-108 |
| | | | | 5,249,973 | 5,254,897 | to -116 |
| 162_-8_NA | 0.006076671 | 0.002156349 | False | chr11: 5,249,964- | chr11: 5,254,888- | HBG1/2 c.-107 |
| | | | | 5,249,971 | 5,254,895 | to -114 |
| 168_-14_NA | 0 | 0.002129053 | False | chr11: 5,249,970- | chr11: 5,254,894- | HBG1/2 c.-113 |
| | | | | 5,249,983 | 5,254,907 | to -126 |
| 167_-16_NA | 0.000050014 | 0.00196528 | False | chr11: 5,249,969- | chr11: 5,254,893- | HBG1/2 c.-112 |
| | | | | 5,249,984 | 5,254,908 | to -127 |
| 166_-16_NA | 0 | 0.001910689 | False | chr11: 5,249,968- | chr11: 5,254,892- | HBG1/2 c.-111 |
| | | | | 5,249,983 | 5,254,907 | to -126 |
| 169_-14_NA | 0.000125034 | 0.001910689 | False | chr11: 5,249,971- | chr11: 5,254,895- | HBG1/2 c.-114 |
| | | | | 5,249,984 | 5,254,908 | to -127 |
| 165_-3_NA | 0.000925254 | 0.001883393 | False | chr11: 5,249,967- | chr11: 5,254,891- | HBG1/2 c.-110 |
| | | | | 5,249,969 | 5,254,893 | to -112 |
| 157_-23_NA | 0.000100028 | 0.001856098 | False | chr11: 5,249,959- | chr11: 5,254,883- | HBG1/2 c.-102 |
| | | | | 5,249,981 | 5,254,905 | to - 124 |
| 165_-14_NA | 0.000025007 | 0.001856098 | False | chr11: 5,249,967- | chr11: 5,254,891- | HBG1/2 c.-110 |
| | | | | 5,249,980 | 5,254,904 | to -123 |
| 166_-27_NA | 0.000225062 | 0.00171962 | True | chr11: 5,249,968- | chr11: 5,254,892- | HBG1/2 c.-111 |
| | | | | 5,249,994 | 5,254,918 | to -137 |
| 165_-9_NA | 0.000200055 | 0.001692324 | False | chr11: 5,249,967- | chr11: 5,254,891- | HBG1/2 c.-110 |
| | | | | 5,249,975 | 5,254,899 | to -118 |
| 167_-18_NA | 0.000250069 | 0.001665029 | False | chr11: 5,249,969- | chr11: 5,254,893- | HBG1/2 c.-112 |
| | | | | 5,249,986 | 5,254,910 | to -129 |
| 156_-27_NA | 0 | 0.001610438 | True | chr11: 5,249,958- | chr11: 5,254,882- | HBG1/2 c.-101 |
| | | | | 5,249,984 | 5,254,908 | to -127 |
| 165_-2_NA | 0.000425117 | 0.001610438 | False | chr11: 5,249,967- | chr11: 5,254,891- | HBG1/2 c.-110 |
| | | | | 5,249,968 | 5,254,892 | to -111 |
| 150_-21_NA | 0.000225062 | 0.001583142 | False | chr11: 5,249,952- | chr11: 5,254,876- | HBG1/2 c.-95 |
| | | | | 5,249,972 | 5,254,896 | to -115 |
| 152_-24_NA | 0.000225062 | 0.001583142 | True | chr11: 5,249,954- | chr11: 5,254,878- | HBG1/2 c.-97 |
| | | | | 5,249,977 | 5,254,901 | to -120 |
| 165_-12_NA | 0.000225062 | 0.001583142 | False | chr11: 5,249,967- | chr11: 5,254,891- | HBG1/2 c.-110 |
| | | | | 5,249,978 | 5,254,902 | to -121 |
| 167_-2_NA | 0.000850234 | 0.001583142 | False | chr11: 5,249,969- | chr11: 5,254,893- | HBG1/2 c.-112 |
| | | | | 5,249,970 | 5,254,894 | to -113 |
| 164_-9_NA | 0.000150041 | 0.001555847 | False | chr11: 5,249,966- | chr11: 5,254,890- | HBG1/2 c.-109 |
| | | | | 5,249,974 | 5,254,898 | to -117 |
| 165_-11_NA | 0.000025007 | 0.001528551 | False | chr11: 5,249,967- | chr11: 5,254,891- | HBG1/2 c.-110 |
| | | | | 5,249,977 | 5,254,901 | to -120 |
| 159_-28_NA | 0.000125034 | 0.001501256 | True | chr11: 5,249,961- | chr11: 5,254,885- | HBG1/2 c.-104 |
| | | | | 5,249,988 | 5,254,912 | to -131 |
| 169_-6_NA | 0.013753782 | 0.001501256 | True | chr11: 5,249,971- | chr11: 5,254,895- | HBG1/2 c.-114 |
| | | | | 5,249,976 | 5,254,900 | to -119 |
| 160_-12_NA | 0.000050014 | 0.00147396 | False | chr11: 5,249,962- | chr11: 5,254,886- | HBG1/2 c.-105 |
| | | | | 5,249,973 | 5,254,897 | to -116 |
| 145_-32_NA | 0.001125309 | 0.001446664 | True | chr11: 5,249,947- | chr11: 5,254,871- | HBG1/2 c.-90 |
| | | | | 5,249,978 | 5,254,902 | to -121 |
| 169_-1_NA | 0.096276476 | 0.001446664 | False | chr11: 5,249,971- | chr11: 5,254,895- | HBG1/2 c.-114 |
| | | | | 5,249,971 | 5,254,895 | to -114 |
| 163_-10_NA | 0.000125034 | 0.001419369 | False | chr11: 5,249,965- | chr11: 5,254,889- | HBG1/2 c.-108 |
| | | | | 5,249,974 | 5,254,898 | to -117 |
| 152_-33_NA | 0.000200055 | 0.001392073 | True | chr11: 5,249,954- | chr11: 5,254,878- | HBG1/2 c.-97 |
| | | | | 5,249,986 | 5,254,910 | to -129 |
| 156_-15_NA | 0.000750206 | 0.001392073 | False | chr11: 5,249,958- | chr11: 5,254,882- | HBG1/2 c.-101 |
| | | | | 5,249,972 | 5,254,896 | to -115 |
| 167_-14_NA | 0.000075021 | 0.001337482 | False | chr11: 5,249,969- | chr11: 5,254,893- | HBG1/2 c.-112 |
| | | | | 5,249,982 | 5,254,906 | to -125 |
| 158_-16_NA | 0 | 0.001310187 | False | chr11: 5,249,960- | chr11: 5,254,884- | HBG1/2 c.-103 |
| | | | | 5,249,975 | 5,254,899 | to -118 |
| 162_-9_NA | 0.002200605 | 0.001310187 | False | chr11: 5,249,964- | chr11: 5,254,888- | HBG1/2 c.-107 |
| | | | | 5,249,972 | 5,254,896 | to -115 |
| 164_-10_NA | 0.000325089 | 0.001310187 | False | chr11: 5,249,966- | chr11: 5,254,890- | HBG1/2 c.-109 |
| | | | | 5,249,975 | 5,254,899 | to -118 |
| 165_-5_NA | 0.001975543 | 0.001310187 | False | chr11: 5,249,967- | chr11: 5,254,891- | HBG1/2 c.-110 |
| | | | | 5,249,971 | 5,254,895 | to - 114 |
| 169_-11_NA | 0.015704319 | 0.001310187 | True | chr11: 5,249,971- | chr11: 5,254,895- | HBG1/2 c.-114 |
| | | | | 5,249,981 | 5,254,905 | to - 124 |
| 170_-4_NA | 0.00040011 | 0.001310187 | False | chr11: 5,249,972- | chr11: 5,254,896- | HBG1/2 c.-115 |
| | | | | 5,249,975 | 5,254,899 | to -118 |
| 152_-29_NA | 0.000450124 | 0.001282891 | True | chr11: 5,249,954- | chr11: 5,254,878- | HBG1/2 c.-97 |
| | | | | 5,249,982 | 5,254,906 | to -125 |
| 161_-11_NA | 0 | 0.0012283 | False | chr11: 5,249,963- | chr11: 5,254,887- | HBG1/2 c.-106 |
| | | | | 5,249,973 | 5,254,897 | to -116 |
| 169_-18_NA | 0.000100028 | 0.0012283 | False | chr11: 5,249,971- | chr11: 5,254,895- | HBG1/2 c.-114 |
| | | | | 5,249,988 | 5,254,912 | to -131 |
| 164_-27_NA | 0.000275076 | 0.001201004 | False | chr11: 5,249,966- | chr11: 5,254,890- | HBG1/2 c.-109 |
| | | | | 5,249,992 | 5,254,916 | to -135 |
| 168_-18_NA | 0.000100028 | 0.001201004 | False | chr11: 5,249,970- | chr11: 5,254,894- | HBG1/2 c.-113 |
| | | | | 5,249,987 | 5,254,911 | to -130 |
| 168_-23_NA | 0 | 0.001201004 | False | chr11: 5,249,970- | chr11: 5,254,894- | HBG1/2 c.-113 |
| | | | | 5,249,992 | 5,254,916 | to -135 |
| 150_-33_NA | 0.000150041 | 0.001173709 | False | chr11: 5,249,952- | chr11: 5,254,876- | HBG1/2 c.-95 |
| | | | | 5,249,984 | 5,254,908 | to -127 |
| 151_-20_NA | 0.000225062 | 0.001173709 | False | chr11: 5,249,953- | chr11: 5,254,877- | HBG1/2 c.-96 |
| | | | | 5,249,972 | 5,254,896 | to -115 |
| 169_-22_NA | 0.000025007 | 0.001173709 | False | chr11: 5,249,971- | chr11: 5,254,895- | HBG1/2 c.-114 |
| | | | | 5,249,992 | 5,254,916 | to -135 |
| 162_-14_NA | 0.000125034 | 0.001146413 | False | chr11: 5,249,964- | chr11: 5,254,888- | HBG1/2 c.-107 |
| | | | | 5,249,977 | 5,254,901 | to -120 |
| 166_-21_NA | 0.000025007 | 0.001146413 | False | chr11: 5,249,968- | chr11: 5,254,892- | HBG1/2 c.-111 |
| | | | | 5,249,988 | 5,254,912 | to -131 |
| 160_-11_NA | 0.001675461 | 0.001119118 | False | chr11: 5,249,962- | chr11: 5,254,886- | HBG1/2 c.-105 |
| | | | | 5,249,972 | 5,254,896 | to -115 |
| 155_-16_NA | 0.000350096 | 0.001091822 | False | chr11: 5,249,957- | chr11: 5,254,881- | HBG1/2 c.-100 |
| | | | | 5,249,972 | 5,254,896 | to -115 |
| 166_-26_NA | 0 | 0.001091822 | False | chr11: 5,249,968- | chr11: 5,254,892- | HBG1/2 c.-111 |
| | | | | 5,249,993 | 5,254,917 | to -136 |
| 157_-24_NA | 0.000125034 | 0.001064527 | False | chr11: 5,249,959- | chr11: 5,254,883- | HBG1/2 c.-102 |
| | | | | 5,249,982 | 5,254,906 | to -125 |
| 165_-15_NA | 0.000050014 | 0.001064527 | False | chr11: 5,249,967- | chr11: 5,254,891- | HBG1/2 c.-110 |
| | | | | 5,249,981 | 5,254,905 | to -124 |
| 162_-33_NA | 0.000025007 | 0.001037231 | True | chr11: 5,249,964- | chr11: 5,254,888- | HBG1/2 c.-107 |
| | | | | 5,249,996 | 5,254,920 | to -139 |
| 163_-12_NA | 0.000100028 | 0.001037231 | False | chr11: 5,249,965- | chr11: 5,254,889- | HBG1/2 c.-108 |
| | | | | 5,249,976 | 5,254,900 | to -119 |
| 163_-6_NA | 0.001050289 | 0.001009936 | False | chr11: 5,249,965- | chr11: 5,254,889- | HBG1/2 c.-108 |
| | | | | 5,249,970 | 5,254,894 | to -113 |
| 164_-28_NA | 0.000175048 | 0.001009936 | False | chr11: 5,249,966- | chr11: 5,254,890- | HBG1/2 c.-109 |
| | | | | 5,249,993 | 5,254,917 | to -136 |
| 155_-12_NA | 0.001150316 | 0.000928049 | True | chr11: 5,249,957- | chr11: 5,254,881- | HBG1/2 c.-100 |
| | | | | 5,249,968 | 5,254,892 | to -111 |
| 137_-27_NA | 0.003901073 | 0.000846162 | True | chr11: 5,249,939- | chr11: 5,254,863- | HBG1/2 c.-82 |
| | | | | 5,249,965 | 5,254,889 | to -108 |
| 161_-10_NA | 0.001625447 | 0.000655093 | False | chr11: 5,249,963- | chr11:5,254,887- | HBG1/2 c.-106 |
| | | | | 5,249,972 | 5,254,896 | to -115 |
| 170_-10_NA | 0.001050289 | 0.000545911 | False | chr11: 5,249,972- | chr11:5,254,896- | HBG1/2 c.-115 |
| | | | | 5,249,981 | 5,254,905 | to -124 |
| 171_-1_NA | 0.018029958 | 0.000464024 | False | chr11: 5,249,973- | chr11: 5,254,897- | HBG1/2 c.-116 |
| | | | | 5,249,973 | 5,254,897 | to -116 |
| 154_-18_NA | 0.001325364 | 0.000327547 | False | chr11: 5,249,956- | chr11: 5,254,880- | HBG1/2 c.-99 |
| | | | | 5,249,973 | 5,254,897 | to -116 |
| 168_-15_NA | 0.007727125 | 0.000300251 | True | chr11: 5,249,970- | chr11: 5,254,894- | HBG1/2 c.-113 |
| | | | | 5,249,984 | 5,254,908 | to -127 |
| 171_-2_NA | 0.003325915 | 0.000191069 | False | chr11: 5,249,973- | chr11: 5,254,897- | HBG1/2 c.-116 |
| | | | | 5,249,974 | 5,254,898 | to -117 |
| 170_1_A | 0.001025282 | 0.000163773 | False | chr11: 5,249,972- | chr11: 5,254,896- | HBG1/2 c.-115 |
| | | | | 5,249,970 | 5,254,894 | to -113 |
| 171_1_C | 0.007877166 | 0.000054591 | False | chr11: 5,249,973- | chr11: 5,254,897- | HBG1/2 c.-116 |
| | | | | 5,249,971 | 5,254,895 | to -114 |
| 169_2_GG | 0.004901348 | 0.000027296 | False | chr11: 5,249,971- | chr11: 5,254,895- | HBG1/2 c.-114 |
| | | | | 5,249,968 | 5,254,892 | to -111 |
| 169_1_G | 0.033684263 | 0 | False | chr11: 5,249,971- | chr11: 5,254,895- | HBG1/2 c.-114 |
| | | | | 5,249,969 | 5,254,893 | to -112 |
| 170_4_CCTT | 0.003876066 | 0 | False | chr11: 5,249,972- | chr11: 5,254,896- | HBG1/2 c.-115 |
| | | | | 5,249,967 | 5,254,891 | to -110 |
| 170_4_GCTT | 0.001450399 | 0 | False | chr11: 5,249,972- | chr11: 5,254,896- | HBG1/2 c.-115 |
| | | | | 5,249,967 | 5,254,891 | to -110 |
| 170_5_GCCTT | 0.001175323 | 0 | False | chr11: 5,249,972- | chr11: 5,254,896- | HBG1/2 c.-115 |
| | | | | 5,249,966 | 5,254,890 | to -109 |
| 170_-301_NA | 0.001225337 | 0 | True | chr11: 5,249,972- | chr11: 5,254,896- | HBG1/2 c.-115 |
| | | | | 5,250,272 | 5,255,196 | to -415 |
| 171_1_A | 0.005251444 | 0 | False | chr11: 5,249,973- | chr11: 5,254,897- | HBG1/2 c.-116 |
| | | | | 5,249,971 | 5,254,895 | to -114 |
| 171_1_T | 0.027407537 | 0 | False | chr11: 5,249,973- | chr11: 5,254,897- | HBG1/2 c.-116 |
| | | | | 5,249,971 | 5,254,895 | to -114 |
| 171_2_CC | 0.007151967 | 0 | False | chr11: 5,249,973- | chr11: 5,254,897- | HBG1/2 c.-116 |
| | | | | 5,249,970 | 5,254,894 | to -113 |
| 171_2_CT | 0.002650729 | 0 | False | chr11: 5,249,973- | chr11: 5,254,897- | HBG1/2 c.-116 |
| | | | | 5,249,970 | 5,254,894 | to -113 |
| 171_2_GA | 0.001050289 | 0 | False | chr11: 5,249,973- | chr11: 5,254,897- | HBG1/2 c.-116 |
| | | | | 5,249,970 | 5,254,894 | to -113 |
| 171_2_TC | 0.003275901 | 0 | False | chr11: 5,249,973- | chr11: 5,254,897- | HBG1/2 c.-116 |
| | | | | 5,249,970 | 5,254,894 | to -113 |
| 171_2_TT | 0.002025557 | 0 | False | chr11: 5,249,973- | chr11: 5,254,897- | HBG1/2 c.-116 |
| | | | | 5,249,970 | 5,254,894 | to -113 |
| 171_3_CCC | 0.001125309 | 0 | False | chr11: 5,249,973- | chr11: 5,254,897- | HBG1/2 c.-116 |
| | | | | 5,249,969 | 5,254,893 | to -112 |

The Indel_id is a string identifying the indel, shown as indel_start_position+_+indel_length+_+ID.
Where ID is NA for deletions and for insertions is the sequence inserted. Positive values indicate insertions and negative values indicate deletions.
The “% in indel” is the percentage of each indel_ID amongst all indels detected in a sample.
In the column labeled MMEJ, “True” indicates the repair was mediated via MMEJ, and “False” indicates the repair was mediated via NHEJ.
The genomic coordinates at HBG1 or HBG2 are reported using the One-based coordinate system, “Homo sapiens chromosome 11, GRCh38.p12 Primary Assembly,” (Version NC_000011.10), NCBI Reference Sequence NC_000011.
The HBG1/2 position indicates the deletion relative to the TSS.

TABLE 32
RNP32 INDELS

| | | | | | Genomic | Genomic | |
|---|---|---|---|---|---|---|---|
| | Ave % | | Cum. | | Coordinates | Coordinates | HBG1/2 |
| Indel Id | in Indel | Cts | Sum | MMEJ | at HBG1 | at HBG2 | position |
| 159_-18_NA | 15.15% | 14 | 15.15% | True | chr11: | chr11: | HBG1/2 |
| | | | | | 5,249,961- | 5,254,885- | c.-104 to -121 |
| | | | | | 5,249,978 | 5,254,902 | |
| 165_-6_NA | 5.92% | 14 | 21.07% | False | chr11: | chr11: | HBG1/2 |
| | | | | | 5,249,967- | 5,254,891- | c.-110 to -115 |
| | | | | | 5,249,972 | 5,254,896 | |
| 167_-4_NA | 5.53% | 14 | 26.60% | False | chr11: | chr11: | HBG1/2 |
| | | | | | 5,249,969- | 5,254,893- | c.-112 to -115 |
| | | | | | 5,249,972 | 5,254,896 | |
| 168_-3_NA | 4.18% | 14 | 30.78% | False | chr11: | chr11: | HBG1/2 |
| | | | | | 5,249,970- | 5,254,894- | c.-113 to -115 |
| | | | | | 5,249,972 | 5,254,896 | |
| 166_-5_NA | 3.19% | 14 | 33.97% | False | chr11: | chr11: | HBG1/2 |
| | | | | | 5,249,968- | 5,254,892- | c.-111 to -115 |
| | | | | | 5,249,972 | 5,254,896 | |
| 166_-7_NA | 3.10% | 14 | 37.07% | False | chr11: | chr11: | HBG1/2 |
| | | | | | 5,249,968- | 5,254,892- | c.-111 to -117 |
| | | | | | 5,249,974 | 5,254,898 | |
| 157_-13_NA | 2.63% | 14 | 39.70% | True | chr11: | chr11: | HBG1/2 |
| | | | | | 5,249,959- | 5,254,883- | c.-102 to -114 |
| | | | | | 5,249,971 | 5,254,895 | |
| 169_-5_NA | 2.07% | 14 | 41.77% | False | chr11: | chr11: | HBG1/2 |
| | | | | | 5,249,971- | 5,254,895- | c.-114 to -118 |
| | | | | | 5,249,975 | 5,254,899 | |
| 167_-5_NA | 1.72% | 14 | 43.49% | False | chr11: | chr11: | HBG1/2 |
| | | | | | 5,249,969- | 5,254,893- | c.-112 to -116 |
| | | | | | 5,249,973 | 5,254,897 | |
| 168_-5_NA | 1.54% | 14 | 45.03% | False | chr11: | chr11: | HBG1/2 |
| | | | | | 5,249,970- | 5,254,894- | c.-113 to -117 |
| | | | | | 5,249,974 | 5,254,898 | |
| 169_-4_NA | 1.43% | 14 | 46.46% | False | chr11: | chr11: | HBG1/2 |
| | | | | | 5,249,971- | 5,254,895- | c.-114 to -117 |
| | | | | | 5,249,974 | 5,254,898 | |
| 166_-8_NA | 1.41% | 14 | 47.88% | False | chr11: | chr11: | HBG1/2 |
| | | | | | 5,249,968- | 5,254,892- | c.-111 to -118 |
| | | | | | 5,249,975 | 5,254,899 | |
| 164_-8_NA | 1.32% | 14 | 49.20% | False | chr11: | chr11: | HBG1/2 |
| | | | | | 5,249,966- | 5,254,890- | c.-109 to -116 |
| | | | | | 5,249,973 | 5,254,897 | |
| 166_-12_NA | 1.28% | 14 | 50.48% | False | chr11: | chr11: | HBG1/2 |
| | | | | | 5,249,968- | 5,254,892- | c.-111 to -122 |
| | | | | | 5,249,979 | 5,254,903 | |
| 166_-13_NA | 1.10% | 14 | 51.58% | False | chr11: | chr11: | HBG1/2 |
| | | | | | 5,249,968- | 5,254,892- | c.-111 to -123 |
| | | | | | 5,249,980 | 5,254,904 | |
| 167_-6_NA | 0.90% | 14 | 52.47% | False | chr11: | chr11: | HBG1/2 |
| | | | | | 5,249,969- | 5,254,893- | c.-112 to -117 |
| | | | | | 5,249,974 | 5,254,898 | |
| 169_-2_NA | 0.83% | 14 | 53.30% | False | chr11: | chr11: | HBG1/2 |
| | | | | | 5,249,971- | 5,254,895- | c.-114 to -115 |
| | | | | | 5,249,972 | 5,254,896 | |
| 168_-6_NA | 0.80% | 14 | 54.10% | False | chr11: | chr11: | HBG1/2 |
| | | | | | 5,249,970- | 5,254,894- | c.-113 to -118 |
| | | | | | 5,249,975 | 5,254,899 | |
| 166_-10_NA | 0.72% | 14 | 54.82% | False | chr11: | chr11: | HBG1/2 |
| | | | | | 5,249,968- | 5,254,892- | c.-111 to -120 |
| | | | | | 5,249,977 | 5,254,901 | |
| 169_-9_NA | 0.69% | 14 | 55.51% | False | chr11: | chr11: | HBG1/2 |
| | | | | | 5,249,971- | 5,254,895- | c.-114 to -122 |
| | | | | | 5,249,979 | 5,254,903 | |
| 168_-8_NA | 0.65% | 14 | 56.16% | False | chr11: | chr11: | HBG1/2 |
| | | | | | 5,249,970- | 5,254,894- | c.-113 to -120 |
| | | | | | 5,249,977 | 5,254,901 | |
| 169_-8_NA | 0.65% | 14 | 56.80% | False | chr11: | chr11: | HBG1/2 |
| | | | | | 5,249,971- | 5,254,895- | c.-114 to -121 |
| | | | | | 5,249,978 | 5,254,902 | |
| 168_-7_NA | 0.59% | 14 | 57.39% | False | chr11: | chr11: | HBG1/2 |
| | | | | | 5,249,970- | 5,254,894- | c.-113 to -119 |
| | | | | | 5,249,976 | 5,254,900 | |
| 165_-7_NA | 0.57% | 14 | 57.97% | False | chr11: | chr11: | HBG1/2 |
| | | | | | 5,249,967- | 5,254,891- | c.-110 to -116 |
| | | | | | 5,249,973 | 5,254,897 | |
| 169_-7_NA | 0.57% | 14 | 58.54% | False | chr11: | chr11: | HBG1/2 |
| | | | | | 5,249,971- | 5,254,895- | c.-114 to -120 |
| | | | | | 5,249,977 | 5,254,901 | |
| 157_-18_NA | 0.55% | 14 | 59.10% | False | chr11: | chr11: | HBG1/2 |
| | | | | | 5,249,959- | 5,254,883- | c.-102 to -119 |
| | | | | | 5,249,976 | 5,254,900 | |
| 168_-10_NA | 0.55% | 14 | 59.64% | False | chr11: | chr11: | HBG1/2 |
| | | | | | 5,249,970- | 5,254,894- | c.-113 to -122 |
| | | | | | 5,249,979 | 5,254,903 | |
| 169_-10_NA | 0.52% | 14 | 60.16% | False | chr11: | chr11: | HBG1/2 |
| | | | | | 5,249,971- | 5,254,895- | c.-114 to -123 |
| | | | | | 5,249,980 | 5,254,904 | |
| 168_-13_NA | 0.52% | 14 | 60.68% | False | chr11: | chr11: | HBG1/2 |
| | | | | | 5,249,970- | 5,254,894- | c.-113 to -125 |
| | | | | | 5,249,982 | 5,254,906 | |
| 168_-9_NA | 0.49% | 14 | 61.17% | False | chr11: | chr11: | HBG1/2 |
| | | | | | 5,249,970- | 5,254,894- | c.-113 to -121 |
| | | | | | 5,249,978 | 5,254,902 | |
| 162_-22_NA | 0.49% | 14 | 61.65% | True | chr11: | chr11: | HBG1/2 |
| | | | | | 5,249,964- | 5,254,888- | c.-107 to -128 |
| | | | | | 5,249,985 | 5,254,909 | |
| 166_-11_NA | 0.48% | 14 | 62.13% | False | chr11: | chr11: | HBG1/2 |
| | | | | | 5,249,968- | 5,254,892- | c.-111 to -121 |
| | | | | | 5,249,978 | 5,254,902 | |
| 169_-6_NA | 0.46% | 14 | 62.59% | True | chr11: | chr11: | HBG1/2 |
| | | | | | 5,249,971- | 5,254,895- | c.-114 to -119 |
| | | | | | 5,249,976 | 5,254,900 | |
| 168_-12_NA | 0.46% | 14 | 63.06% | False | chr11: | chr11: | HBG1/2 |
| | | | | | 5,249,970- | 5,254,894- | c.-113 to -124 |
| | | | | | 5,249,981 | 5,254,905 | |
| 166_-15_NA | 0.43% | 14 | 63.49% | False | chr11: | chr11: | HBG1/2 |
| | | | | | 5,249,968- | 5,254,892- | c.-111 to -125 |
| | | | | | 5,249,982 | 5,254,906 | |
| 167_-16_NA | 0.43% | 14 | 63.92% | False | chr11: | chr11: | HBG1/2 |
| | | | | | 5,249,969- | 5,254,893- | c.-112 to -127 |
| | | | | | 5,249,984 | 5,254,908 | |
| 166_-4_NA | 0.42% | 14 | 64.35% | False | chr11: | chr11: | HBG1/2 |
| | | | | | 5,249,968- | 5,254,892- | c.-111 to -114 |
| | | | | | 5,249,971 | 5,254,895 | |
| 167_-11_NA | 0.42% | 14 | 64.77% | False | chr11: | chr11: | HBG1/2 |
| | | | | | 5,249,969- | 5,254,893- | c.-112 to -122 |
| | | | | | 5,249,979 | 5,254,903 | |
| 162_-7_NA | 0.42% | 14 | 65.19% | True | chr11: | chr11: | HBG1/2 |
| | | | | | 5,249,964- | 5,254,888- | c.-107 to -113 |
| | | | | | 5,249,970 | 5,254,894 | |
| 170_-2_NA | 0.42% | 14 | 65.60% | False | chr11: | chr11: | HBG1/2 |
| | | | | | 5,249,972- | 5,254,896- | c.-115 to -116 |
| | | | | | 5,249,973 | 5,254,897 | |
| 168_-11_NA | 0.40% | 14 | 66.00% | False | chr11: | chr11: | HBG1/2 |
| | | | | | 5,249,970- | 5,254,894- | c.-113 to -123 |
| | | | | | 5,249,980 | 5,254,904 | |
| 167_-1_NA | 0.37% | 14 | 66.37% | False | chr11: | chr11: | HBG1/2 |
| | | | | | 5,249,969- | 5,254,893- | c.-112 to -112 |
| | | | | | 5,249,969 | 5,254,893 | |
| 166_-9_NA | 0.33% | 14 | 66.71% | False | chr11: | chr11: | HBG1/2 |
| | | | | | 5,249,968- | 5,254,892- | c.-111 to -119 |
| | | | | | 5,249,976 | 5,254,900 | |
| 167_-10_NA | 0.32% | 14 | 67.03% | False | chr11: | chr11: | HBG1/2 |
| | | | | | 5,249,969- | 5,254,893- | c.-112 to -121 |
| | | | | | 5,249,978 | 5,254,902 | |
| 166_-14_NA | 0.32% | 14 | 67.35% | False | chr11: | chr11: | HBG1/2 |
| | | | | | 5,249,968- | 5,254,892- | c.-111 to -124 |
| | | | | | 5,249,981 | 5,254,905 | |
| 167_-9_NA | 0.30% | 14 | 67.65% | False | chr11: | chr11: | HBG1/2 |
| | | | | | 5,249,969- | 5,254,893- | c.-112 to -120 |
| | | | | | 5,249,977 | 5,254,901 | |
| 168_-2_NA | 0.29% | 14 | 67.94% | False | chr11: | chr11: | HBG1/2 |
| | | | | | 5,249,970- | 5,254,894- | c.-113 to -114 |
| | | | | | 5,249,971 | 5,254,895 | |
| 169_-12_NA | 0.28% | 14 | 68.22% | False | chr11: | chr11: | HBG1/2 |
| | | | | | 5,249,971- | 5,254,895- | c.-114 to -125 |
| | | | | | 5,249,982 | 5,254,906 | |
| 169_-13_NA | 0.27% | 14 | 68.49% | False | chr11: | chr11: | HBG1/2 |
| | | | | | 5,249,971- | 5,254,895- | c.-114 to -126 |
| | | | | | 5,249,983 | 5,254,907 | |
| 169_-11_NA | 0.26% | 14 | 68.74% | True | chr11: | chr11: | HBG1/2 |
| | | | | | 5,249,971- | 5,254,895- | c.-114 to -124 |
| | | | | | 5,249,981 | 5,254,905 | |
| 165_-9_NA | 0.24% | 14 | 68.99% | False | chr11: | chr11: | HBG1/2 |
| | | | | | 5,249,967- | 5,254,891- | c.-110 to -118 |
| | | | | | 5,249,975 | 5,254,899 | |
| 167_-3_NA | 0.23% | 14 | 69.22% | False | chr11: | chr11: | HBG1/2 |
| | | | | | 5,249,969- | 5,254,893- | c.-112 to -114 |
| | | | | | 5,249,971 | 5,254,895 | |
| 163_-9_NA | 0.23% | 14 | 69.45% | False | chr11: | chr11: | HBG1/2 |
| | | | | | 5,249,965- | 5,254,889- | c.-108 to -116 |
| | | | | | 5,249,973 | 5,254,897 | |
| 167_-14_NA | 0.23% | 14 | 69.68% | False | chr11: | chr11: | HBG1/2 |
| | | | | | 5,249,969- | 5,254,893- | c.-112 to -125 |
| | | | | | 5,249,982 | 5,254,906 | |
| 152_-24_NA | 0.22% | 14 | 69.90% | True | chr11: | chr11: | HBG1/2 |
| | | | | | 5,249,954- | 5,254,878- | c.-97 to -120 |
| | | | | | 5,249,977 | 5,254,901 | |
| 157_-19_NA | 0.22% | 13 | 70.12% | False | chr11: | chr11: | HBG1/2 |
| | | | | | 5,249,959- | 5,254,883- | c.-102 to -120 |
| | | | | | 5,249,977 | 5,254,901 | |
| 163_-12_NA | 0.20% | 14 | 70.32% | False | chr11: | chr11: | HBG1/2 |
| | | | | | 5,249,965- | 5,254,889- | c.-108 to -119 |
| | | | | | 5,249,976 | 5,254,900 | |
| 166_-16_NA | 0.20% | 14 | 70.52% | False | chr11: | chr11: | HBG1/2 |
| | | | | | 5,249,968- | 5,254,892- | c.-111 to -126 |
| | | | | | 5,249,983 | 5,254,907 | |
| 162_-10_NA | 0.19% | 13 | 70.72% | False | chr11: | chr11: | HBG1/2 |
| | | | | | 5,249,964- | 5,254,888- | c.-107 to -116 |
| | | | | | 5,249,973 | 5,254,897 | |
| 158_-14_NA | 0.19% | 13 | 70.91% | False | chr11: | chr11: | HBG1/2 |
| | | | | | 5,249,960- | 5,254,884- | c.-103 to -116 |
| | | | | | 5,249,973 | 5,254,897 | |
| 159_-28_NA | 0.19% | 14 | 71.10% | True | chr11: | chr11: | HBG1/2 |
| | | | | | 5,249,961- | 5,254,885- | c.-104 to -131 |
| | | | | | 5,249,988 | 5,254,912 | |
| 162_-8_NA | 0.19% | 14 | 71.28% | False | chr11: | chr11: | HBG1/2 |
| | | | | | 5,249,964- | 5,254,888- | c.-107 to -114 |
| | | | | | 5,249,971 | 5,254,895 | |
| 165_-2_NA | 0.19% | 14 | 71.47% | False | chr11: | chr11: | HBG1/2 |
| | | | | | 5,249,967- | 5,254,891- | c.-110 to -111 |
| | | | | | 5,249,968 | 5,254,892 | |
| 152_-33_NA | 0.19% | 14 | 71.65% | True | chr11: | chr11: | HBG1/2 |
| | | | | | 5,249,954- | 5,254,878- | c.-97 to -129 |
| | | | | | 5,249,986 | 5,254,910 | |
| 168_-14_NA | 0.18% | 14 | 71.84% | False | chr11: | chr11: | HBG1/2 |
| | | | | | 5,249,970- | 5,254,894- | c.-113 to -126 |
| | | | | | 5,249,983 | 5,254,907 | |
| 161_-12_NA | 0.18% | 13 | 72.02% | False | chr11: | chr11: | HBG1/2 |
| | | | | | 5,249,963- | 5,254,887- | c.-106 to -117 |
| | | | | | 5,249,974 | 5,254,898 | |
| 170_-4_NA | 0.18% | 14 | 72.20% | False | chr11: | chr11: | HBG1/2 |
| | | | | | 5,249,972- | 5,254,896- | c.-115 to -118 |
| | | | | | 5,249,975 | 5,254,899 | |
| 162_-9_NA | 0.18% | 13 | 72.37% | False | chr11: | chr11: | HBG1/2 |
| | | | | | 5,249,964- | 5,254,888- | c.-107 to -115 |
| | | | | | 5,249,972 | 5,254,896 | |
| 164_-23_NA | 0.18% | 13 | 72.55% | False | chr11: | chr11: | HBG1/2 |
| | | | | | 5,249,966- | 5,254,890- | c.-109 to -131 |
| | | | | | 5,249,988 | 5,254,912 | |
| 164_-10_NA | 0.18% | 14 | 72.73% | False | chr11: | chr11: | HBG1/2 |
| | | | | | 5,249,966- | 5,254,890- | c.-109 to -118 |
| | | | | | 5,249,975 | 5,254,899 | |
| 166_-27_NA | 0.17% | 14 | 72.90% | True | chr11: | chr11: | HBG1/2 |
| | | | | | 5,249,968- | 5,254,892- | c.-111 to -137 |
| | | | | | 5,249,994 | 5,254,918 | |
| 160_-12_NA | 0.16% | 14 | 73.06% | False | chr11: | chr11: | HBG1/2 |
| | | | | | 5,249,962- | 5,254,886- | c.-105 to -116 |
| | | | | | 5,249,973 | 5,254,897 | |
| 165_-12_NA | 0.16% | 14 | 73.22% | False | chr11: | chr11: | HBG1/2 |
| | | | | | 5,249,967- | 5,254,891- | c.-110 to -121 |
| | | | | | 5,249,978 | 5,254,902 | |
| 170_-5_NA | 0.16% | 14 | 73.38% | False | chr11: | chr11: | HBG1/2 |
| | | | | | 5,249,972- | 5,254,896- | c.-115 to -119 |
| | | | | | 5,249,976 | 5,254,900 | |
| 165_-11_NA | 0.16% | 14 | 73.54% | False | chr11: | chr11: | HBG1/2 |
| | | | | | 5,249,967- | 5,254,891- | c.-110 to -120 |
| | | | | | 5,249,977 | 5,254,901 | |
| 137_-27_NA | 0.15% | 14 | 73.69% | True | chr11: | chr11: | HBG1/2 |
| | | | | | 5,249,939- | 5,254,863- | c.-82 to -108 |
| | | | | | 5,249,965 | 5,254,889 | |
| 165_-3_NA | 0.15% | 14 | 73.84% | False | chr11: | chr11: | HBG1/2 |
| | | | | | 5,249,967- | 5,254,891- | c.-110 to -112 |
| | | | | | 5,249,969 | 5,254,893 | |
| 169_-14_NA | 0.15% | 14 | 73.99% | False | chr11: | chr11: | HBG1/2 |
| | | | | | 5,249,971- | 5,254,895- | c.-114 to -127 |
| | | | | | 5,249,984 | 5,254,908 | |
| 172_-5_NA | 0.15% | 14 | 74.14% | True | chr11: | chr11: | HBG1/2 |
| | | | | | 5,249,974- | 5,254,898- | c.-117 to -121 |
| | | | | | 5,249,978 | 5,254,902 | |
| 164_-9_NA | 0.15% | 14 | 74.29% | False | chr11: | chr11: | HBG1/2 |
| | | | | | 5,249,966- | 5,254,890- | c.-109 to -117 |
| | | | | | 5,249,974 | 5,254,898 | |
| 152_-29_NA | 0.14% | 13 | 74.44% | True | chr11: | chr11: | HBG1/2 |
| | | | | | 5,249,954- | 5,254,878- | c.-97 to -125 |
| | | | | | 5,249,982 | 5,254,906 | |
| 166_-22_NA | 0.14% | 14 | 74.58% | False | chr11: | chr11: | HBG1/2 |
| | | | | | 5,249,968- | 5,254,892- | c.-111 to -132 |
| | | | | | 5,249,989 | 5,254,913 | |
| 169_-1_NA | 0.14% | 14 | 74.72% | False | chr11: | chr11: | HBG1/2 |
| | | | | | 5,249,971- | 5,254,895- | c.-114 to -114 |
| | | | | | 5,249,971 | 5,254,895 | |
| 161_-17_NA | 0.13% | 14 | 74.85% | False | chr11: | chr11: | HBG1/2 |
| | | | | | 5,249,963- | 5,254,887- | c.-106 to -122 |
| | | | | | 5,249,979 | 5,254,903 | |
| 162_-14_NA | 0.13% | 14 | 74.98% | False | chr11: | chr11: | HBG1/2 |
| | | | | | 5,249,964- | 5,254,888- | c.-107 to -120 |
| | | | | | 5,249,977 | 5,254,901 | |
| 153_-19_NA | 0.13% | 14 | 75.11% | False | chr11: | chr11: | HBG1/2 |
| | | | | | 5,249,955- | 5,254,879- | c.-98 to -116 |
| | | | | | 5,249,973 | 5,254,897 | |
| 151_-20_NA | 0.13% | 14 | 75.23% | False | chr11: | chr11: | HBG1/2 |
| | | | | | 5,249,953- | 5,254,877- | c.-96 to -115 |
| | | | | | 5,249,972 | 5,254,896 | |
| 161_-11_NA | 0.13% | 13 | 75.36% | False | chr11: | chr11: | HBG1/2 |
| | | | | | 5,249,963- | 5,254,887- | c.-106 to -116 |
| | | | | | 5,249,973 | 5,254,897 | |
| 165_-5_NA | 0.13% | 14 | 75.49% | False | chr11: | chr11: | HBG1/2 |
| | | | | | 5,249,967- | 5,254,891- | c.-110 to -114 |
| | | | | | 5,249,971 | 5,254,895 | |
| 156_-15_NA | 0.12% | 14 | 75.61% | False | chr11: | chr11: | HBG1/2 |
| | | | | | 5,249,958- | 5,254,882- | c.-101 to -115 |
| | | | | | 5,249,972 | 5,254,896 | |
| 167_-2_NA | 0.12% | 14 | 75.73% | False | chr11: | chr11: | HBG1/2 |
| | | | | | 5,249,969- | 5,254,893- | c.-112 to -113 |
| | | | | | 5,249,970 | 5,254,894 | |
| 167_-18_NA | 0.12% | 14 | 75.86% | False | chr11: | chr11: | HBG1/2 |
| | | | | | 5,249,969- | 5,254,893- | c.-112 to -129 |
| | | | | | 5,249,986 | 5,254,910 | |
| 145_-32_NA | 0.12% | 13 | 75.98% | True | chr11: | chr11: | HBG1/2 |
| | | | | | 5,249,947- | 5,254,871- | c.-90 to -121 |
| | | | | | 5,249,978 | 5,254,902 | |
| 166_-21_NA | 0.12% | 14 | 76.10% | False | chr11: | chr11: | HBG1/2 |
| | | | | | 5,249,968- | 5,254,892- | c.-111 to -131 |
| | | | | | 5,249,988 | 5,254,912 | |
| 169_-18_NA | 0.12% | 14 | 76.22% | False | chr11: | chr11: | HBG1/2 |
| | | | | | 5,249,971- | 5,254,895- | c.-114 to -131 |
| | | | | | 5,249,988 | 5,254,912 | |
| 153_-38_NA | 0.12% | 13 | 76.34% | True | chr11: | chr11: | HBG1/2 |
| | | | | | 5,249,955- | 5,254,879- | c.-98 to -135 |
| | | | | | 5,249,992 | 5,254,916 | |
| 163_-17_NA | 0.12% | 14 | 76.46% | False | chr11: | chr11: | HBG1/2 |
| | | | | | 5,249,965- | 5,254,889- | c.-108 to -124 |
| | | | | | 5,249,981 | 5,254,905 | |
| 165_-14_NA | 0.12% | 14 | 76.58% | False | chr11: | chr11: | HBG1/2 |
| | | | | | 5,249,967- | 5,254,891- | c.-110 to -123 |
| | | | | | 5,249,980 | 5,254,904 | |
| 165_-15_NA | 0.12% | 14 | 76.70% | False | chr11: | chr11: | HBG1/2 |
| | | | | | 5,249,967- | 5,254,891- | c.-110 to -124 |
| | | | | | 5,249,981 | 5,254,905 | |
| 160_-14_NA | 0.12% | 13 | 76.81% | False | chr11: | chr11: | HBG1/2 |
| | | | | | 5,249,962- | 5,254,886- | c.-105 to -118 |
| | | | | | 5,249,975 | 5,254,899 | |
| 166_-25_NA | 0.11% | 13 | 76.93% | False | chr11: | chr11: | HBG1/2 |
| | | | | | 5,249,968- | 5,254,892- | c.-111 to -135 |
| | | | | | 5,249,992 | 5,254,916 | |
| 170_-9_NA | 0.11% | 14 | 77.04% | False | chr11: | chr11: | HBG1/2 |
| | | | | | 5,249,972- | 5,254,896- | c.-115 to -123 |
| | | | | | 5,249,980 | 5,254,904 | |
| 152_-18_NA | 0.11% | 14 | 77.15% | False | chr11: | chr11: | HBG1/2 |
| | | | | | 5,249,954- | 5,254,878- | c.-97 to -114 |
| | | | | | 5,249,971 | 5,254,895 | |
| 168_-18_NA | 0.11% | 14 | 77.26% | False | chr11: | chr11: | HBG1/2 |
| | | | | | 5,249,970- | 5,254,894- | c.-113 to -130 |
| | | | | | 5,249,987 | 5,254,911 | |
| 163_-10_NA | 0.11% | 14 | 77.38% | False | chr11: | chr11: | HBG1/2 |
| | | | | | 5,249,965- | 5,254,889- | c.-108 to -117 |
| | | | | | 5,249,974 | 5,254,898 | |
| 160_-11_NA | 0.11% | 14 | 77.49% | False | chr11: | chr11: | HBG1/2 |
| | | | | | 5,249,962- | 5,254,886- | c.-105 to -115 |
| | | | | | 5,249,972 | 5,254,896 | |
| 150_-21_NA | 0.11% | 13 | 77.59% | False | chr11: | chr11: | HBG1/2 |
| | | | | | 5,249,952- | 5,254,876- | c.-95 to -115 |
| | | | | | 5,249,972 | 5,254,896 | |
| 157_-23_NA | 0.11% | 13 | 77.70% | False | chr11: | chr11: | HBG1/2 |
| | | | | | 5,249,959- | 5,254,883- | c.-102 to -124 |
| | | | | | 5,249,981 | 5,254,905 | |
| 155_-16_NA | 0.11% | 12 | 77.81% | False | chr11: | chr11: | HBG1/2 |
| | | | | | 5,249,957- | 5,254,881- | c.-100 to -115 |
| | | | | | 5,249,972 | 5,254,896 | |
| 167_-17_NA | 0.11% | 12 | 77.92% | False | chr11: | chr11: | HBG1/2 |
| | | | | | 5,249,969- | 5,254,893- | c.-112 to -128 |
| | | | | | 5,249,985 | 5,254,909 | |
| 164_-28_NA | 0.11% | 13 | 78.02% | False | chr11: | chr11: | HBG1/2 |
| | | | | | 5,249,966- | 5,254,890- | c.-109 to -136 |
| | | | | | 5,249,993 | 5,254,917 | |
| 164_-27_NA | 0.10% | 14 | 78.12% | False | chr11: | chr11: | HBG1/2 |
| | | | | | 5,249,966- | 5,254,890- | c.-109 to -135 |
| | | | | | 5,249,992 | 5,254,916 | |
| 156_-38_NA | 0.10% | 13 | 78.22% | True | chr11: | chr11: | HBG1/2 |
| | | | | | 5,249,958- | 5,254,882- | c.-101 to -138 |
| | | | | | 5,249,995 | 5,254,919 | |
| 154_-18_NA | 0.10% | 12 | 78.32% | False | chr11: | chr11: | HBG1/2 |
| | | | | | 5,249,956- | 5,254,880- | c.-99 to -116 |
| | | | | | 5,249,973 | 5,254,897 | |
| 156_-27_NA | 0.10% | 13 | 78.42% | True | chr11: | chr11: | HBG1/2 |
| | | | | | 5,249,958- | 5,254,882- | c.-101 to -127 |
| | | | | | 5,249,984 | 5,254,908 | |
| 157_-24_NA | 0.10% | 11 | 78.52% | False | chr11: | chr11: | HBG1/2 |
| | | | | | 5,249,959- | 5,254,883- | c.-102 to -125 |
| | | | | | 5,249,982 | 5,254,906 | |
| 168_-19_NA | 0.10% | 14 | 78.62% | False | chr11: | chr11: | HBG1/2 |
| | | | | | 5,249,970- | 5,254,894- | c.-113 to -131 |
| | | | | | 5,249,988 | 5,254,912 | |
| 165_-10_NA | 0.10% | 14 | 78.72% | False | chr11: | chr11: | HBG1/2 |
| | | | | | 5,249,967- | 5,254,891- | c.-110 to -119 |
| | | | | | 5,249,976 | 5,254,900 | |
| 171_-1_NA | 0.10% | 14 | 78.82% | False | chr11: | chr11: | HBG1/2 |
| | | | | | 5,249,973- | 5,254,897- | c.-116 to -116 |
| | | | | | 5,249,973 | 5,254,897 | |
| 165_-16_NA | 0.10% | 13 | 78.92% | False | chr11: | chr11: | HBG1/2 |
| | | | | | 5,249,967- | 5,254,891- | c.-110 to -125 |
| | | | | | 5,249,982 | 5,254,906 | |
| 164_-14_NA | 0.10% | 12 | 79.02% | False | chr11: | chr11: | HBG1/2 |
| | | | | | 5,249,966- | 5,254,890- | c.-109 to -122 |
| | | | | | 5,249,979 | 5,254,903 | |
| 167_-4_NA; | 0.10% | 14 | 79.11% | False | chr11: | chr11: | HBG1/2 |
| 175_-1_NA | | | | | 5,249,969- | 5,254,893- | c.-112 to -115; |
| | | | | | 5,249,972; | 5,254,896; | HBG1/2 |
| | | | | | chr11: | chr11: | c.-120 to -120 |
| | | | | | 5,249,977- | 5,254,901- | |
| | | | | | 5,249,977 | 5,254,901 | |
| 160_-19_NA | 0.10% | 14 | 79.21% | False | chr11: | chr11: | HBG1/2 |
| | | | | | 5,249,962- | 5,254,886- | c.-105 to -123 |
| | | | | | 5,249,980 | 5,254,904 | |
| 166_-17_NA | 0.10% | 13 | 79.30% | False | chr11: | chr11: | HBG1/2 |
| | | | | | 5,249,968- | 5,254,892- | c.-111 to -127 |
| | | | | | 5,249,984 | 5,254,908 | |
| 168_-15_NA | 0.10% | 14 | 79.40% | True | chr11: | chr11: | HBG1/2 |
| | | | | | 5,249,970- | 5,254,894- | c.-113 to -127 |
| | | | | | 5,249,984 | 5,254,908 | |
| 162_-33_NA | 0.09% | 12 | 79.49% | True | chr11: | chr11: | HBG1/2 |
| | | | | | 5,249,964- | 5,254,888- | c.-107 to -139 |
| | | | | | 5,249,996 | 5,254,920 | |
| 168_-25_NA | 0.09% | 13 | 79.58% | False | chr11: | chr11: | HBG1/2 |
| | | | | | 5,249,970- | 5,254,894- | c.-113 to -137 |
| | | | | | 5,249,994 | 5,254,918 | |
| 166_-20_NA | 0.09% | 10 | 79.67% | False | chr11: | chr11: | HBG1/2 |
| | | | | | 5,249,968- | 5,254,892- | c.-111 to -130 |
| | | | | | 5,249,987 | 5,254,911 | |
| 170_-3_NA | 0.09% | 13 | 79.76% | False | chr11: | chr11: | HBG1/2 |
| | | | | | 5,249,972- | 5,254,896- | c.-115 to -117 |
| | | | | | 5,249,974 | 5,254,898 | |
| 157_-28_NA | 0.09% | 11 | 79.84% | False | chr11: | chr11: | HBG1/2 |
| | | | | | 5,249,959- | 5,254,883- | c.-102 to -129 |
| | | | | | 5,249,986 | 5,254,910 | |
| 166_-26_NA | 0.09% | 13 | 79.93% | False | chr11: | chr11: | HBG1/2 |
| | | | | | 5,249,968- | 5,254,892- | c.-111 to -136 |
| | | | | | 5,249,993 | 5,254,917 | |
| 160_-259_NA | 0.08% | 9 | 80.01% | True | chr11: | chr11: | HBG1/2 |
| | | | | | 5,249,962- | 5,254,886- | c.-105 to -363 |
| | | | | | 5,250,220 | 5,255,144 | |
| 160_-16_NA | 0.08% | 12 | 80.09% | False | chr11: | chr11: | HBG1/2 |
| | | | | | 5,249,962- | 5,254,886- | c.-105 to -120 |
| | | | | | 5,249,977 | 5,254,901 | |
| 159_-23_NA | 0.08% | 13 | 80.17% | False | chr11: | chr11: | HBG1/2 |
| | | | | | 5,249,961- | 5,254,885- | c.-104 to -126 |
| | | | | | 5,249,983 | 5,254,907 | |
| 167_-25_NA | 0.08% | 13 | 80.25% | False | chr11: | chr11: | HBG1/2 |
| | | | | | 5,249,969- | 5,254,893- | c.-112 to -136 |
| | | | | | 5,249,993 | 5,254,917 | |
| 165_-6_NA; | 0.08% | 14 | 80.33% | False | chr11: | chr11: | HBG1/2 |
| 175_-1_NA | | | | | 5,249,967- | 5,254,891- | c.-110 to -115; |
| | | | | | 5,249,972; | 5,254,896; | HBG1/2 |
| | | | | | chr11: | chr11: | c.-120 to -120 |
| | | | | | 5,249,977- | 5,254,901- | |
| | | | | | 5,249,977 | 5,254,901 | |
| 157_-14_NA | 0.08% | 13 | 80.41% | False | chr11: | chr11: | HBG1/2 |
| | | | | | 5,249,959- | 5,254,883- | c.-102 to -115 |
| | | | | | 5,249,972 | 5,254,896 | |
| 154_-28_NA | 0.08% | 13 | 80.49% | True | chr11: | chr11: | HBG1/2 |
| | | | | | 5,249,956- | 5,254,880- | c.-99 to -126 |
| | | | | | 5,249,983 | 5,254,907 | |
| 168_-23_NA | 0.08% | 12 | 80.56% | False | chr11: | chr11: | HBG1/2 |
| | | | | | 5,249,970- | 5,254,894- | c.-113 to -135 |
| | | | | | 5,249,992 | 5,254,916 | |
| 169_-23_NA | 0.08% | 14 | 80.64% | False | chr11: | chr11: | HBG1/2 |
| | | | | | 5,249,971- | 5,254,895- | c.-114 to -136 |
| | | | | | 5,249,993 | 5,254,917 | |
| 167_-4_NA; | 0.07% | 12 | 80.71% | False | chr11: | chr11: | HBG1/2 |
| 174_-2_NA | | | | | 5,249,969- | 5,254,893- | c.-112 to -115; |
| | | | | | 5,249,972; | 5,254,896; | HBG1/2 |
| | | | | | chr11: | chr11: | c.-119 to -120 |
| | | | | | 5,249,976- | 5,254,900- | |
| | | | | | 5,249,977 | 5,254,901 | |
| 167_-36_NA | 0.07% | 11 | 80.79% | True | chr11: | chr11: | HBG1/2 |
| | | | | | 5,249,969- | 5,254,893- | c.-112 to -147 |
| | | | | | 5,250,004 | 5,254,928 | |
| 165_-29_NA | 0.07% | 12 | 80.86% | False | chr11: | chr11: | HBG1/2 |
| | | | | | 5,249,967- | 5,254,891- | c.-110 to -138 |
| | | | | | 5,249,995 | 5,254,919 | |
| 163_-6_NA | 0.07% | 13 | 80.93% | False | chr11: | chr11: | HBG1/2 |
| | | | | | 5,249,965- | 5,254,889- | c.-108 to -113 |
| | | | | | 5,249,970 | 5,254,894 | |
| 159_-33_NA | 0.07% | 13 | 81.01% | True | chr11: | chr11: | HBG1/2 |
| | | | | | 5,249,961- | 5,254,885- | c.-104 to -136 |
| | | | | | 5,249,993 | 5,254,917 | |
| 162_-11_NA | 0.07% | 13 | 81.08% | False | chr11: | chr11: | HBG1/2 |
| | | | | | 5,249,964- | 5,254,888- | c.-107 to -117 |
| | | | | | 5,249,974 | 5,254,898 | |
| 167_-20_NA | 0.07% | 10 | 81.15% | False | chr11: | chr11: | HBG1/2 |
| | | | | | 5,249,969- | 5,254,893- | c.-112 to -131 |
| | | | | | 5,249,988 | 5,254,912 | |
| 169_-24_NA | 0.07% | 13 | 81.21% | False | chr11: | chr11: | HBG1/2 |
| | | | | | 5,249,971- | 5,254,895- | c.-114 to -137 |
| | | | | | 5,249,994 | 5,254,918 | |
| 167_-24_NA | 0.07% | 11 | 81.28% | False | chr11: | chr11: | HBG1/2 |
| | | | | | 5,249,969- | 5,254,893- | c.-112 to -135 |
| | | | | | 5,249,992 | 5,254,916 | |
| 164_-15_NA | 0.07% | 13 | 81.35% | False | chr11: | chr11: | HBG1/2 |
| | | | | | 5,249,966- | 5,254,890- | c.-109 to -123 |
| | | | | | 5,249,980 | 5,254,904 | |
| 166_-19_NA | 0.07% | 12 | 81.42% | False | chr11: | chr11: | HBG1/2 |
| | | | | | 5,249,968- | 5,254,892- | c.-111 to -129 |
| | | | | | 5,249,986 | 5,254,910 | |
| 166_-1_NA | 0.07% | 13 | 81.49% | False | chr11: | chr11: | HBG1/2 |
| | | | | | 5,249,968- | 5,254,892- | c.-111 to -111 |
| | | | | | 5,249,968 | 5,254,892 | |
| 169_-17_NA | 0.07% | 12 | 81.55% | False | chr11: | chr11: | HBG1/2 |
| | | | | | 5,249,971- | 5,254,895- | c.-114 to -130 |
| | | | | | 5,249,987 | 5,254,911 | |
| 154_-17_NA | 0.07% | 11 | 81.62% | False | chr11: | chr11: | HBG1/2 |
| | | | | | 5,249,956- | 5,254,880- | c.-99 to -115 |
| | | | | | 5,249,972 | 5,254,896 | |
| 164_-11_NA | 0.07% | 12 | 81.68% | False | chr11: | chr11: | HBG1/2 |
| | | | | | 5,249,966- | 5,254,890- | c.-109 to -119 |
| | | | | | 5,249,976 | 5,254,900 | |
| 166_-5_NA; | 0.07% | 12 | 81.75% | False | chr11: | chr11: | HBG1/2 |
| 175_-1_NA | | | | | 5,249,968- | 5,254,892- | c.-111 to -115; |
| | | | | | 5,249,972; | 5,254,896; | HBG1/2 |
| | | | | | chr11: | chr11: | c.-120 to -120 |
| | | | | | 5,249,977- | 5,254,901- | |
| | | | | | 5,249,977 | 5,254,901 | |
| 170_-10_NA | 0.07% | 14 | 81.81% | False | chr11: | chr11: | HBG1/2 |
| | | | | | 5,249,972- | 5,254,896- | c.-115 to -124 |
| | | | | | 5,249,981 | 5,254,905 | |
| 152_-19_NA | 0.06% | 11 | 81.88% | False | chr11: | chr11: | HBG1/2 |
| | | | | | 5,249,954- | 5,254,878- | c.-97 to -115 |
| | | | | | 5,249,972 | 5,254,896 | |
| 166_-23_NA | 0.06% | 12 | 81.94% | False | chr11: | chr11: | HBG1/2 |
| | | | | | 5,249,968- | 5,254,892- | c.-111 to -133 |
| | | | | | 5,249,990 | 5,254,914 | |
| 162_-19_NA | 0.06% | 14 | 82.01% | False | chr11: | chr11: | HBG1/2 |
| | | | | | 5,249,964- | 5,254,888- | c.-107 to -125 |
| | | | | | 5,249,982 | 5,254,906 | |
| 167_-38_NA | 0.06% | 12 | 82.07% | False | chr11: | chr11: | HBG1/2 |
| | | | | | 5,249,969- | 5,254,893- | c.-112 to -149 |
| | | | | | 5,250,006 | 5,254,930 | |
| 161_-10_NA | 0.06% | 13 | 82.14% | False | chr11: | chr11: | HBG1/2 |
| | | | | | 5,249,963- | 5,254,887- | c.-106 to -115 |
| | | | | | 5,249,972 | 5,254,896 | |
| 158_-15_NA | 0.06% | 12 | 82.20% | False | chr11: | chr11: | HBG1/2 |
| | | | | | 5,249,960- | 5,254,884- | c.-103 to -117 |
| | | | | | 5,249,974 | 5,254,898 | |
| 163_-11_NA | 0.06% | 12 | 82.26% | False | chr11: | chr11: | HBG1/2 |
| | | | | | 5,249,965- | 5,254,889- | c.-108 to -118 |
| | | | | | 5,249,975 | 5,254,899 | |
| 168_-17_NA | 0.06% | 11 | 82.33% | False | chr11: | chr11: | HBG1/2 |
| | | | | | 5,249,970- | 5,254,894- | c.-113 to -129 |
| | | | | | 5,249,986 | 5,254,910 | |
| 151_-43_NA | 0.06% | 12 | 82.39% | True | chr11: | chr11: | HBG1/2 |
| | | | | | 5,249,953- | 5,254,877- | c.-96 to -138 |
| | | | | | 5,249,995 | 5,254,919 | |
| 158_-16_NA | 0.06% | 12 | 82.45% | False | chr11: | chr11: | HBG1/2 |
| | | | | | 5,249,960- | 5,254,884- | c.-103 to -118 |
| | | | | | 5,249,975 | 5,254,899 | |
| 169_-19_NA | 0.06% | 13 | 82.51% | False | chr11: | chr11: | HBG1/2 |
| | | | | | 5,249,971- | 5,254,895- | c.-114 to -132 |
| | | | | | 5,249,989 | 5,254,913 | |
| 170_-17_NA | 0.06% | 12 | 82.57% | False | chr11: | chr11: | HBG1/2 |
| | | | | | 5,249,972- | 5,254,896- | c.-115 to -131 |
| | | | | | 5,249,988 | 5,254,912 | |
| 158_-21_NA | 0.06% | 12 | 82.63% | False | chr11: | chr11: | HBG1/2 |
| | | | | | 5,249,960- | 5,254,884- | c.-103 to -123 |
| | | | | | 5,249,980 | 5,254,904 | |
| 152_-28_NA | 0.06% | 13 | 82.69% | False | chr11: | chr11: | HBG1/2 |
| | | | | | 5,249,954- | 5,254,878- | c.-97 to -124 |
| | | | | | 5,249,981 | 5,254,905 | |
| 150_-33_NA | 0.06% | 13 | 82.74% | False | chr11: | chr11: | HBG1/2 |
| | | | | | 5,249,952- | 5,254,876- | c.-95 to -127 |
| | | | | | 5,249,984 | 5,254,908 | |
| 170_-13_NA | 0.05% | 13 | 82.80% | False | chr11: | chr11: | HBG1/2 |
| | | | | | 5,249,972- | 5,254,896- | c.-115 to -127 |
| | | | | | 5,249,984 | 5,254,908 | |
| 165_-19_NA | 0.05% | 13 | 82.85% | False | chr11: | chr11: | HBG1/2 |
| | | | | | 5,249,967- | 5,254,891- | c.-110 to -128 |
| | | | | | 5,249,985 | 5,254,909 | |
| 158_-17_NA | 0.05% | 11 | 82.91% | False | chr11: | chr11: | HBG1/2 |
| | | | | | 5,249,960- | 5,254,884- | c.-103 to -119 |
| | | | | | 5,249,976 | 5,254,900 | |
| 159_-11_NA | 0.05% | 7 | 82.96% | False | chr11: | chr11: | HBG1/2 |
| | | | | | 5,249,961- | 5,254,885- | c.-104 to -114 |
| | | | | | 5,249,971 | 5,254,895 | |
| 158_-20_NA | 0.05% | 12 | 83.01% | False | chr11: | chr11: | HBG1/2 |
| | | | | | 5,249,960- | 5,254,884- | c.-103 to -122 |
| | | | | | 5,249,979 | 5,254,903 | |
| 155_-12_NA | 0.05% | 10 | 83.07% | True | chr11: | chr11: | HBG1/2 |
| | | | | | 5,249,957- | 5,254,881- | c.-100 to -111 |
| | | | | | 5,249,968 | 5,254,892 | |
| 168_-3_NA; | 0.05% | 12 | 83.12% | False | chr11: | chr11: | HBG1/2 |
| 175_-1_NA | | | | | 5,249,970- | 5,254,894- | c.-113 to -115; |
| | | | | | 5,249,972; | 5,254,896; | HBG1/2 |
| | | | | | chr11: | chr11: | c.-120 to -120 |
| | | | | | 5,249,977- | 5,254,901- | |
| | | | | | 5,249,977 | 5,254,901 | |
| 169_-16_NA | 0.05% | 14 | 83.17% | False | chr11: | chr11: | HBG1/2 |
| | | | | | 5,249,971- | 5,254,895- | c.-114 to -129 |
| | | | | | 5,249,986 | 5,254,910 | |
| 157_-40_NA | 0.05% | 13 | 83.22% | True | chr11: | chr11: | HBG1/2 |
| | | | | | 5,249,959- | 5,254,883- | c.-102 to -141 |
| | | | | | 5,249,998 | 5,254,922 | |
| 168_-24_NA | 0.05% | 11 | 83.27% | False | chr11: | chr11: | HBG1/2 |
| | | | | | 5,249,970- | 5,254,894- | c.-113 to -136 |
| | | | | | 5,249,993 | 5,254,917 | |
| 165_-6_NA; | 0.05% | 12 | 83.33% | False | chr11: | chr11: | HBG1/2 |
| 174_-2_NA | | | | | 5,249,967- | 5,254,891- | c.-110 to -115; |
| | | | | | 5,249,972; | 5,254,896; | HBG1/2 |
| | | | | | chr11: | chr11: | c.-119 to -120 |
| | | | | | 5,249,976- | 5,254,900- | |
| | | | | | 5,249,977 | 5,254,901 | |
| 158_-36_NA | 0.05% | 11 | 83.38% | False | chr11: | chr11: | HBG1/2 |
| | | | | | 5,249,960- | 5,254,884- | c.-103 to -138 |
| | | | | | 5,249,995 | 5,254,919 | |
| 169_-22_NA | 0.05% | 12 | 83.43% | False | chr11: | chr11: | HBG1/2 |
| | | | | | 5,249,971- | 5,254,895- | c.-114 to -135 |
| | | | | | 5,249,992 | 5,254,916 | |
| 157_-16_NA | 0.05% | 14 | 83.48% | False | chr11: | chr11: | HBG1/2 |
| | | | | | 5,249,959- | 5,254,883- | c.-102 to -117 |
| | | | | | 5,249,974 | 5,254,898 | |
| 165_-291_NA | 0.05% | 7 | 83.53% | True | chr11: | chr11: | HBG1/2 |
| | | | | | 5,249,967- | 5,254,891- | c.-110 to -400 |
| | | | | | 5,250,257 | 5,255,181 | |
| 173_-1_NA | 0.05% | 12 | 83.58% | False | chr11: | chr11: | HBG1/2 |
| | | | | | 5,249,975- | 5,254,899- | c.-118 to -118 |
| | | | | | 5,249,975 | 5,254,899 | |
| 167_-26_NA | 0.05% | 11 | 83.63% | False | chr11: | chr11: | HBG1/2 |
| | | | | | 5,249,969- | 5,254,893- | c.-112 to -137 |
| | | | | | 5,249,994 | 5,254,918 | |
| 148_-22_NA | 0.05% | 10 | 83.68% | True | chr11: | chr11: | HBG1/2 |
| | | | | | 5,249,950- | 5,254,874- | c.-93 to -114 |
| | | | | | 5,249,971 | 5,254,895 | |
| 152_-23_NA | 0.05% | 10 | 83.72% | False | chr11: | chr11: | HBG1/2 |
| | | | | | 5,249,954- | 5,254,878- | c.-97 to -119 |
| | | | | | 5,249,976 | 5,254,900 | |
| 165_-4_NA | 0.05% | 11 | 83.77% | False | chr11: | chr11: | HBG1/2 |
| | | | | | 5,249,967- | 5,254,891- | c.-110 to -113 |
| | | | | | 5,249,970 | 5,254,894 | |
| 165_-17_NA | 0.05% | 12 | 83.82% | False | chr11: | chr11: | HBG1/2 |
| | | | | | 5,249,967- | 5,254,891- | c.-110 to -126 |
| | | | | | 5,249,983 | 5,254,907 | |
| 165_-298_NA | 0.05% | 6 | 83.87% | False | chr11: | chr11: | HBG1/2 |
| | | | | | 5,249,967- | 5,254,891- | c.-110 to -407 |
| | | | | | 5,250,264 | 5,255,188 | |
| 154_-23_NA | 0.05% | 11 | 83.92% | False | chr11: | chr11: | HBG1/2 |
| | | | | | 5,249,956- | 5,254,880- | c.-99 to -121 |
| | | | | | 5,249,978 | 5,254,902 | |
| 168_-3_NA; | 0.05% | 11 | 83.96% | False | chr11: | chr11: | HBG1/2 |
| 174_-2_NA | | | | | 5,249,970- | 5,254,894- | c.-113 to -115; |
| | | | | | 5,249,972; | 5,254,896; | HBG1/2 |
| | | | | | chr11: | chr11: | c.-119 to -120 |
| | | | | | 5,249,976- | 5,254,900- | |
| | | | | | 5,249,977 | 5,254,901 | |
| 165_-5_NA; | 0.05% | 1 | 84.01% | False | chr11: | chr11: | HBG1/2 |
| 174_-12_NA | | | | | 5,249,967- | 5,254,891- | c.-110 to -114; |
| | | | | | 5,249,971; | 5,254,895; | HBG1/2 |
| | | | | | chr11: | chr11: | c.-119 to -130 |
| | | | | | 5,249,976- | 5,254,900- | |
| | | | | | 5,249,987 | 5,254,911 | |
| 165_-271_NA | 0.05% | 6 | 84.06% | True | chr11: | chr11: | HBG1/2 |
| | | | | | 5,249,967- | 5,254,891- | c.-110 to -380 |
| | | | | | 5,250,237 | 5,255,161 | |
| 164_-4_NA; | 0.05% | 4 | 84.11% | False | chr11: | chr11: | HBG1/2 |
| 174_-2_NA | | | | | 5,249,966- | 5,254,890- | c.-109 to -112; |
| | | | | | 5,249,969; | 5,254,893; | HBG1/2 |
| | | | | | chr11: | chr11: | c.-119 to -120 |
| | | | | | 5,249,976- | 5,254,900- | |
| | | | | | 5,249,977 | 5,254,901 | |
| 160_-8_NA; | 0.05% | 7 | 84.15% | False | chr11: | chr11: | HBG1/2 |
| 170_-251_NA | | | | | 5,249,962- | 5,254,886- | c.-105 to -112; |
| | | | | | 5,249,969; | 5,254,893; | HBG1/2 |
| | | | | | chr11: | chr11: | c.-115 to -365 |
| | | | | | 5,249,972- | 5,254,896- | |
| | | | | | 5,250,222 | 5,255,146 | |
| 167_-31_NA | 0.05% | 11 | 84.20% | False | chr11: | chr11: | HBG1/2 |
| | | | | | 5,249,969- | 5,254,893- | c.-112 to -142 |
| | | | | | 5,249,999 | 5,254,923 | |
| 159_-24_NA | 0.05% | 9 | 84.24% | False | chr11: | chr11: | HBG1/2 |
| | | | | | 5,249,961- | 5,254,885- | c.-104 to -127 |
| | | | | | 5,249,984 | 5,254,908 | |
| 151_-32_NA | 0.05% | 11 | 84.29% | True | chr11: | chr11: | HBG1/2 |
| | | | | | 5,249,953- | 5,254,877- | c.-96 to -127 |
| | | | | | 5,249,984 | 5,254,908 | |
| 170_-8_NA | 0.04% | 13 | 84.34% | False | chr11: | chr11: | HBG1/2 |
| | | | | | 5,249,972- | 5,254,896- | c.-115 to -122 |
| | | | | | 5,249,979 | 5,254,903 | |
| 151_-29_NA | 0.04% | 12 | 84.38% | False | chr11: | chr11: | HBG1/2 |
| | | | | | 5,249,953- | 5,254,877- | c.-96 to -124 |
| | | | | | 5,249,981 | 5,254,905 | |
| 151_-22_NA | 0.04% | 12 | 84.42% | False | chr11: | chr11: | HBG1/2 |
| | | | | | 5,249,953- | 5,254,877- | c.-96 to -117 |
| | | | | | 5,249,974 | 5,254,898 | |
| 153_-21_NA | 0.04% | 11 | 84.47% | False | chr11: | chr11: | HBG1/2 |
| | | | | | 5,249,955- | 5,254,879- | c.-98 to -118 |
| | | | | | 5,249,975 | 5,254,899 | |
| 167_-19_NA | 0.04% | 10 | 84.51% | False | chr11: | chr11: | HBG1/2 |
| | | | | | 5,249,969- | 5,254,893- | c.-112 to -130 |
| | | | | | 5,249,987 | 5,254,911 | |
| 168_-22_NA | 0.04% | 13 | 84.56% | False | chr11: | chr11: | HBG1/2 |
| | | | | | 5,249,970- | 5,254,894- | c.-113 to -134 |
| | | | | | 5,249,991 | 5,254,915 | |
| 164_-26_NA | 0.04% | 10 | 84.60% | False | chr11: | chr11: | HBG1/2 |
| | | | | | 5,249,966- | 5,254,890- | c.-109 to -134 |
| | | | | | 5,249,991 | 5,254,915 | |
| 153_-34_NA | 0.04% | 14 | 84.64% | False | chr11: | chr11: | HBG1/2 |
| | | | | | 5,249,955- | 5,254,879- | c.-98 to -131 |
| | | | | | 5,249,988 | 5,254,912 | |
| 162_-15_NA | 0.04% | 11 | 84.68% | False | chr11: | chr11: | HBG1/2 |
| | | | | | 5,249,964- | 5,254,888- | c.-107 to -121 |
| | | | | | 5,249,978 | 5,254,902 | |
| 159_-27_NA | 0.04% | 11 | 84.72% | False | chr11: | chr11: | HBG1/2 |
| | | | | | 5,249,961- | 5,254,885- | c.-104 to -130 |
| | | | | | 5,249,987 | 5,254,911 | |
| 153_-37_NA | 0.04% | 9 | 84.76% | True | chr11: | chr11: | HBG1/2 |
| | | | | | 5,249,955- | 5,254,879- | c.-98 to -134 |
| | | | | | 5,249,991 | 5,254,915 | |
| 175_-1_NA | 0.04% | 12 | 84.80% | False | chr11: | chr11: | HBG1/2 |
| | | | | | 5,249,977- | 5,254,901- | c.-120 to -120 |
| | | | | | 5,249,977 | 5,254,901 | |
| 160_-10_NA | 0.04% | 11 | 84.84% | False | chr11: | chr11: | HBG1/2 |
| | | | | | 5,249,962- | 5,254,886- | c.-105 to -114 |
| | | | | | 5,249,971 | 5,254,895 | |
| 155_-19_NA | 0.04% | 11 | 84.88% | False | chr11: | chr11: | HBG1/2 |
| | | | | | 5,249,957- | 5,254,881- | c.-100 to -118 |
| | | | | | 5,249,975 | 5,254,899 | |
| 164_-5_NA | 0.04% | 9 | 84.92% | False | chr11: | chr11: | HBG1/2 |
| | | | | | 5,249,966- | 5,254,890- | c.-109 to -113 |
| | | | | | 5,249,970 | 5,254,894 | |
| 163_-15_NA | 0.04% | 12 | 84.96% | False | chr11: | chr11: | HBG1/2 |
| | | | | | 5,249,965- | 5,254,889- | c.-108 to -122 |
| | | | | | 5,249,979 | 5,254,903 | |
| 161_-22_NA | 0.04% | 9 | 85.00% | False | chr11: | chr11: | HBG1/2 |
| | | | | | 5,249,963- | 5,254,887- | c.-106 to -127 |
| | | | | | 5,249,984 | 5,254,908 | |
| 155_-17_NA | 0.04% | 12 | 85.04% | False | chr11: | chr11: | HBG1/2 |
| | | | | | 5,249,957- | 5,254,881- | c.-100 to -116 |
| | | | | | 5,249,973 | 5,254,897 | |
| 165_-6_NA; | 0.04% | 11 | 85.07% | False | chr11: | chr11: | HBG1/2 |
| 176_-2_NA | | | | | 5,249,967- | 5,254,891- | c.-110 to -115; |
| | | | | | 5,249,972; | 5,254,896; | HBG1/2 |
| | | | | | chr11: | chr11: | c.-121 to -122 |
| | | | | | 5,249,978- | 5,254,902- | |
| | | | | | 5,249,979 | 5,254,903 | |
| 150_-32_NA | 0.04% | 11 | 85.11% | False | chr11: | chr11: | HBG1/2 |
| | | | | | 5,249,952- | 5,254,876- | c.-95 to -126 |
| | | | | | 5,249,983 | 5,254,907 | |
| 169_-25_NA | 0.04% | 13 | 85.15% | False | chr11: | chr11: | HBG1/2 |
| | | | | | 5,249,971- | 5,254,895- | c.-114 to -138 |
| | | | | | 5,249,995 | 5,254,919 | |
| 148_-33_NA | 0.04% | 9 | 85.19% | False | chr11: | chr11: | HBG1/2 |
| | | | | | 5,249,950- | 5,254,874- | c.-93 to -125 |
| | | | | | 5,249,982 | 5,254,906 | |
| 166_-36_NA | 0.04% | 10 | 85.22% | False | chr11: | chr11: | HBG1/2 |
| | | | | | 5,249,968- | 5,254,892- | c.-111 to -146 |
| | | | | | 5,250,003 | 5,254,927 | |
| 164_-19_NA | 0.04% | 10 | 85.26% | False | chr11: | chr11: | HBG1/2 |
| | | | | | 5,249,966- | 5,254,890- | c.-109 to -127 |
| | | | | | 5,249,984 | 5,254,908 | |
| 171_-3_NA | 0.04% | 12 | 85.29% | False | chr11: | chr11: | HBG1/2 |
| | | | | | 5,249,973- | 5,254,897- | c.-116 to -118 |
| | | | | | 5,249,975 | 5,254,899 | |
| 169_-21_NA | 0.03% | 10 | 85.33% | False | chr11: | chr11: | HBG1/2 |
| | | | | | 5,249,971- | 5,254,895- | c.-114 to -134 |
| | | | | | 5,249,991 | 5,254,915 | |
| 152_-22_NA | 0.03% | 10 | 85.36% | False | chr11: | chr11: | HBG1/2 |
| | | | | | 5,249,954- | 5,254,878- | c.-97 to -118 |
| | | | | | 5,249,975 | 5,254,899 | |
| 165_-6_NA; | 0.03% | 10 | 85.40% | False | chr11: | chr11: | HBG1/2 |
| 175_-2_NA | | | | | 5,249,967- | 5,254,891- | c.-110 to -115; |
| | | | | | 5,249,972; | 5,254,896; | HBG1/2 |
| | | | | | chr11: | chr11: | c.-120 to -121 |
| | | | | | 5,249,977- | 5,254,901- | |
| | | | | | 5,249,978 | 5,254,902 | |
| 162_-311_NA | 0.03% | 1 | 85.43% | True | chr11: | chr11: | HBG1/2 |
| | | | | | 5,249,964- | 5,254,888- | c.-107 to -417 |
| | | | | | 5,250,274 | 5,255,198 | |
| 166_-5_NA; | 0.03% | 12 | 85.47% | False | chr11: | chr11: | HBG1/2 |
| 174_-2_NA | | | | | 5,249,968- | 5,254,892- | c.-111 to -115; |
| | | | | | 5,249,972; | 5,254,896; | HBG1/2 |
| | | | | | chr11: | chr11: | c.-119 to -120 |
| | | | | | 5,249,976- | 5,254,900- | |
| | | | | | 5,249,977 | 5,254,901 | |
| 168_-3_NA; | 0.03% | 10 | 85.50% | False | chr11: | chr11: | HBG1/2 |
| 174_-4_NA | | | | | 5,249,970- | 5,254,894- | c.-113 to -115; |
| | | | | | 5,249,972; | 5,254,896; | HBG1/2 |
| | | | | | chr11: | chr11: | c.-119 to -122 |
| | | | | | 5,249,976- | 5,254,900- | |
| | | | | | 5,249,979 | 5,254,903 | |
| 161_-15_NA | 0.03% | 12 | 85.54% | False | chr11: | chr11: | HBG1/2 |
| | | | | | 5,249,963- | 5,254,887- | c.-106 to -120 |
| | | | | | 5,249,977 | 5,254,901 | |
| 167_-1_NA; | 0.03% | 9 | 85.57% | False; | chr11: | chr11: | HBG1/2 |
| 172_-5_NA | | | | True | 5,249,969- | 5,254,893- | c.-112 to -112; |
| | | | | | 5,249,969; | 5,254,893; | HBG1/2 |
| | | | | | chr11: | chr11: | c.-117 to -121 |
| | | | | | 5,249,974- | 5,254,898- | |
| | | | | | 5,249,978 | 5,254,902 | |
| 157_-29_NA | 0.03% | 9 | 85.60% | False | chr11: | chr11: | HBG1/2 |
| | | | | | 5,249,959- | 5,254,883- | c.-102 to -130 |
| | | | | | 5,249,987 | 5,254,911 | |
| 163_-313_NA | 0.03% | 8 | 85.63% | True | chr11: | chr11: | HBG1/2 |
| | | | | | 5,249,965- | 5,254,889- | c.-108 to -420 |
| | | | | | 5,250,277 | 5,255,201 | |
| 152_-25_NA | 0.03% | 10 | 85.67% | False | chr11: | chr11: | HBG1/2 |
| | | | | | 5,249,954- | 5,254,878- | c.-97 to -121 |
| | | | | | 5,249,978 | 5,254,902 | |
| 159_-15_NA | 0.03% | 10 | 85.70% | False | chr11: | chr11: | HBG1/2 |
| | | | | | 5,249,961- | 5,254,885- | c.-104 to -118 |
| | | | | | 5,249,975 | 5,254,899 | |
| 156_-20_NA | 0.03% | 8 | 85.73% | False | chr11: | chr11: | HBG1/2 |
| | | | | | 5,249,958- | 5,254,882- | c.-101 to -120 |
| | | | | | 5,249,977 | 5,254,901 | |
| 157_-21_NA | 0.03% | 10 | 85.76% | False | chr11: | chr11: | HBG1/2 |
| | | | | | 5,249,959- | 5,254,883- | c.-102 to -122 |
| | | | | | 5,249,979 | 5,254,903 | |
| 168_-30_NA | 0.03% | 11 | 85.79% | True | chr11: | chr11: | HBG1/2 |
| | | | | | 5,249,970- | 5,254,894- | c.-113 to -142 |
| | | | | | 5,249,999 | 5,254,923 | |
| 161_-40_NA | 0.03% | 8 | 85.82% | True | chr11: | chr11: | HBG1/2 |
| | | | | | 5,249,963- | 5,254,887- | c.-106 to -145 |
| | | | | | 5,250,002 | 5,254,926 | |
| 172_-18_NA | 0.03% | 10 | 85.85% | False | chr11: | chr11: | HBG1/2 |
| | | | | | 5,249,974- | 5,254,898- | c.-117 to -134 |
| | | | | | 5,249,991 | 5,254,915 | |
| 167_-11_NA; | 0.03% | 4 | 85.88% | False | chr11: | chr11: | HBG1/2 |
| 180_-2_NA | | | | | 5,249,969- | 5,254,893- | c.-112 to -122; |
| | | | | | 5,249,979; | 5,254,903; | HBG1/2 |
| | | | | | chr11: | chr11: | c.-125 to -126 |
| | | | | | 5,249,982- | 5,254,906- | |
| | | | | | 5,249,983 | 5,254,907 | |
| 167_-4_NA; | 0.03% | 9 | 85.91% | False | chr11: | chr11: | HBG1/2 |
| 175_-2_NA | | | | | 5,249,969- | 5,254,893- | c.-112 to -115; |
| | | | | | 5,249,972; | 5,254,896; | HBG1/2 |
| | | | | | chr11: | chr11: | c.-120 to -121 |
| | | | | | 5,249,977- | 5,254,901- | |
| | | | | | 5,249,978 | 5,254,902 | |
| 166_-5_NA; | 0.03% | 6 | 85.94% | False | chr11: | chr11: | HBG1/2 |
| 175_-2_NA | | | | | 5,249,968- | 5,254,892- | c.-111 to -115; |
| | | | | | 5,249,972; | 5,254,896; | HBG1/2 |
| | | | | | chr11: | chr11: | c.-120 to -121 |
| | | | | | 5,249,977- | 5,254,901- | |
| | | | | | 5,249,978 | 5,254,902 | |
| 161_-8_NA | 0.03% | 10 | 85.97% | False | chr11: | chr11: | HBG1/2 |
| | | | | | 5,249,963- | 5,254,887- | c.-106 to -113 |
| | | | | | 5,249,970 | 5,254,894 | |
| 162_-23_NA | 0.03% | 9 | 86.00% | False | chr11: | chr11: | HBG1/2 |
| | | | | | 5,249,964- | 5,254,888- | c.-107 to -129 |
| | | | | | 5,249,986 | 5,254,910 | |
| 156_-30_NA | 0.03% | 8 | 86.03% | False | chr11: | chr11: | HBG1/2 |
| | | | | | 5,249,958- | 5,254,882- | c.-101 to -130 |
| | | | | | 5,249,987 | 5,254,911 | |
| 46_-338_NA | 0.03% | 1 | 86.05% | True | chr11: | chr11: | HBG1/2 |
| | | | | | 5,249,848- | 5,254,772- | c.9 to -328 |
| | | | | | 5,250,185 | 5,255,109 | |
| 150_-41_NA | 0.03% | 6 | 86.08% | False | chr11: | chr11: | HBG1/2 |
| | | | | | 5,249,952- | 5,254,876- | c.-95 to -135 |
| | | | | | 5,249,992 | 5,254,916 | |
| 154_-20_NA | 0.03% | 11 | 86.11% | False | chr11: | chr11: | HBG1/2 |
| | | | | | 5,249,956- | 5,254,880- | c.-99 to -118 |
| | | | | | 5,249,975 | 5,254,899 | |
| 156_-17_NA | 0.03% | 12 | 86.14% | False | chr11: | chr11: | HBG1/2 |
| | | | | | 5,249,958- | 5,254,882- | c.-101 to -117 |
| | | | | | 5,249,974 | 5,254,898 | |
| 158_-25_NA | 0.03% | 9 | 86.16% | False | chr11: | chr11: | HBG1/2 |
| | | | | | 5,249,960- | 5,254,884- | c.-103 to -127 |
| | | | | | 5,249,984 | 5,254,908 | |
| 161_-32_NA | 0.03% | 10 | 86.19% | False | chr11: | chr11: | HBG1/2 |
| | | | | | 5,249,963- | 5,254,887- | c.-106 to -137 |
| | | | | | 5,249,994 | 5,254,918 | |
| 168_-32_NA | 0.03% | 10 | 86.22% | False | chr11: | chr11: | HBG1/2 |
| | | | | | 5,249,970- | 5,254,894- | c.-113 to -144 |
| | | | | | 5,250,001 | 5,254,925 | |
| 151_-30_NA | 0.03% | 8 | 86.24% | False | chr11: | chr11: | HBG1/2 |
| | | | | | 5,249,953- | 5,254,877- | c.-96 to -125 |
| | | | | | 5,249,982 | 5,254,906 | |
| 156_-40_NA | 0.03% | 5 | 86.27% | False | chr11: | chr11: | HBG1/2 |
| | | | | | 5,249,958- | 5,254,882- | c.-101 to -140 |
| | | | | | 5,249,997 | 5,254,921 | |
| 168_-29_NA | 0.03% | 8 | 86.29% | False | chr11: | chr11: | HBG1/2 |
| | | | | | 5,249,970- | 5,254,894- | c.-113 to -141 |
| | | | | | 5,249,998 | 5,254,922 | |
| 165_-38_NA | 0.03% | 10 | 86.32% | False | chr11: | chr11: | HBG1/2 |
| | | | | | 5,249,967- | 5,254,891- | c.-110 to -147 |
| | | | | | 5,250,004 | 5,254,928 | |
| 165_-2_NA; | 0.03% | 1 | 86.35% | False | chr11: | chr11: | HBG1/2 |
| 170_-14_NA; | | | | | 5,249,967- | 5,254,891- | c.-110 to -111; |
| 188_1_A | | | | | 5,249,968; | 5,254,892; | HBG1/2 |
| | | | | | chr11: | chr11: | c.-115 to -128; |
| | | | | | 5,249,972- | 5,254,896- | HBG1/2 |
| | | | | | 5,249,985; | 5,254,909; | c.-133 to -131 |
| | | | | | chr11: | chr11: | |
| | | | | | 5,249,990- | 5,254,914- | |
| | | | | | 5,249,988 | 5,254,912 | |
| 163_-16_NA | 0.02% | 10 | 86.37% | False | chr11: | chr11: | HBG1/2 |
| | | | | | 5,249,965- | 5,254,889- | c.-108 to -123 |
| | | | | | 5,249,980 | 5,254,904 | |
| 172_-2_NA | 0.02% | 9 | 86.39% | False | chr11: | chr11: | HBG1/2 |
| | | | | | 5,249,974- | 5,254,898- | c.-117 to -118 |
| | | | | | 5,249,975 | 5,254,899 | |
| 174_-2_NA | 0.02% | 11 | 86.42% | False | chr11: | chr11: | HBG1/2 |
| | | | | | 5,249,976- | 5,254,900- | c.-119 to -120 |
| | | | | | 5,249,977 | 5,254,901 | |
| 166_-7_NA; | 0.02% | 6 | 86.44% | False | chr11: | chr11: | HBG1/2 |
| 176_-2_NA | | | | | 5,249,968- | 5,254,892- | c.-111 to -117; |
| | | | | | 5,249,974; | 5,254,898; | HBG1/2 |
| | | | | | chr11: | chr11: | c.-121 to -122 |
| | | | | | 5,249,978- | 5,254,902- | |
| | | | | | 5,249,979 | 5,254,903 | |
| 160_-21_NA | 0.02% | 11 | 86.47% | False | chr11: | chr11: | HBG1/2 |
| | | | | | 5,249,962- | 5,254,886- | c.-105 to -125 |
| | | | | | 5,249,982 | 5,254,906 | |
| 155_-24_NA | 0.02% | 10 | 86.49% | False | chr11: | chr11: | HBG1/2 |
| | | | | | 5,249,957- | 5,254,881- | c.-100 to -123 |
| | | | | | 5,249,980 | 5,254,904 | |
| 164_-20_NA | 0.02% | 7 | 86.52% | False | chr11: | chr11: | HBG1/2 |
| | | | | | 5,249,966- | 5,254,890- | c.-109 to -128 |
| | | | | | 5,249,985 | 5,254,909 | |
| 169_-8_NA; | 0.02% | 2 | 86.54% | False | chr11: | chr11: | HBG1/2 |
| 180_-5_NA | | | | | 5,249,971- | 5,254,895- | c.-114 to -121; |
| | | | | | 5,249,978; | 5,254,902; | HBG1/2 |
| | | | | | chr11: | chr11: | c.-125 to -129 |
| | | | | | 5,249,982- | 5,254,906- | |
| | | | | | 5,249,986 | 5,254,910 | |
| 167_-28_NA | 0.02% | 10 | 86.56% | False | chr11: | chr11: | HBG1/2 |
| | | | | | 5,249,969- | 5,254,893- | c.-112 to -139 |
| | | | | | 5,249,996 | 5,254,920 | |
| 158_-22_NA | 0.02% | 10 | 86.59% | False | chr11: | chr11: | HBG1/2 |
| | | | | | 5,249,960- | 5,254,884- | c.-103 to -124 |
| | | | | | 5,249,981 | 5,254,905 | |
| 164_-16_NA | 0.02% | 11 | 86.61% | False | chr11: | chr11: | HBG1/2 |
| | | | | | 5,249,966- | 5,254,890- | c.-109 to -124 |
| | | | | | 5,249,981 | 5,254,905 | |
| 169_-4_NA; | 0.02% | 7 | 86.63% | False | chr11: | chr11: | HBG1/2 |
| 175_-2_NA | | | | | 5,249,971- | 5,254,895- | c.-114 to -117; |
| | | | | | 5,249,974; | 5,254,898; | HBG1/2 |
| | | | | | chr11: | chr11: | c.-120 to -121 |
| | | | | | 5,249,977- | 5,254,901- | |
| | | | | | 5,249,978 | 5,254,902 | |
| 151_-25_NA | 0.02% | 10 | 86.66% | False | chr11: | chr11: | HBG1/2 |
| | | | | | 5,249,953- | 5,254,877- | c.-96 to -120 |
| | | | | | 5,249,977 | 5,254,901 | |
| 165_-6_NA; | 0.02% | 11 | 86.68% | False | chr11: | chr11: | HBG1/2 |
| 174_-4_NA | | | | | 5,249,967- | 5,254,891- | c.-110 to -115; |
| | | | | | 5,249,972; | 5,254,896; | HBG1/2 |
| | | | | | chr11: | chr11: | c.-119 to -122 |
| | | | | | 5,249,976- | 5,254,900- | |
| | | | | | 5,249,979 | 5,254,903 | |
| 157_-13_NA; | 0.02% | 8 | 86.70% | False; | chr11: | chr11: | HBG1/2 |
| 180_-5_NA | | | | True | 5,249,959- | 5,254,883- | c.-102 to -114; |
| | | | | | 5,249,971; | 5,254,895; | HBG1/2 |
| | | | | | chr11: | chr11: | c.-125 to -129 |
| | | | | | 5,249,982- | 5,254,906- | |
| | | | | | 5,249,986 | 5,254,910 | |
| 156_-36_NA | 0.02% | 6 | 86.73% | False | chr11: | chr11: | HBG1/2 |
| | | | | | 5,249,958- | 5,254,882- | c.-101 to -136 |
| | | | | | 5,249,993 | 5,254,917 | |
| 164_-10_NA; | 0.02% | 1 | 86.75% | False | chr11: | chr11: | HBG1/2 |
| 177_-2_NA | | | | | 5,249,966- | 5,254,890- | c.-109 to -118; |
| | | | | | 5,249,975; | 5,254,899; | HBG1/2 |
| | | | | | chr11: | chr11: | c.-122 to -123 |
| | | | | | 5,249,979- | 5,254,903- | |
| | | | | | 5,249,980 | 5,254,904 | |
| 166_-293_NA | 0.02% | 2 | 86.77% | False | chr11: | chr11: | HBG1/2 |
| | | | | | 5,249,968- | 5,254,892- | c.-111 to -403 |
| | | | | | 5,250,260 | 5,255,184 | |
| 156_-31_NA | 0.02% | 8 | 86.79% | False | chr11: | chr11: | HBG1/2 |
| | | | | | 5,249,958- | 5,254,882- | c.-101 to -131 |
| | | | | | 5,249,988 | 5,254,912 | |
| 169_-8_NA; | 0.02% | 4 | 86.82% | False; | chr11: | chr11: | HBG1/2 |
| 180_-4_NA | | | | True | 5,249,971- | 5,254,895- | c.-114 to -121; |
| | | | | | 5,249,978; | 5,254,902; | HBG1/2 |
| | | | | | chr11: | chr11: | c.-125 to -128 |
| | | | | | 5,249,982- | 5,254,906- | |
| | | | | | 5,249,985 | 5,254,909 | |
| 155_-8_NA; | 0.02% | 1 | 86.84% | False | chr11: | chr11: | HBG1/2 |
| 165_-5_NA | | | | | 5,249,957- | 5,254,881- | c.-100 to -107; |
| | | | | | 5,249,964; | 5,254,888; | HBG1/2 |
| | | | | | chr11: | chr11: | c.-110 to -114 |
| | | | | | 5,249,967- | 5,254,891- | |
| | | | | | 5,249,971 | 5,254,895 | |
| 167_1_C; | 0.02% | 1 | 86.86% | False | chr11: | chr11: | HBG1/2 |
| 171_-4_NA | | | | | 5,249,969- | 5,254,893- | c.-112 to -110; |
| | | | | | 5,249,967; | 5,254,891; | HBG1/2 |
| | | | | | chr11: | chr11: | c.-116 to -119 |
| | | | | | 5,249,973- | 5,254,897- | |
| | | | | | 5,249,976 | 5,254,900 | |
| 165_-7_NA; | 0.02% | 6 | 86.88% | False | chr11: | chr11: | HBG1/2 |
| 175_-1_NA | | | | | 5,249,967- | 5,254,891- | c.-110 to -116; |
| | | | | | 5,249,973; | 5,254,897; | HBG1/2 |
| | | | | | chr11: | chr11: | c.-120 to -120 |
| | | | | | 5,249,977- | 5,254,901- | |
| | | | | | 5,249,977 | 5,254,901 | |
| 160_-20_NA | 0.02% | 11 | 86.91% | False | chr11: | chr11: | HBG1/2 |
| | | | | | 5,249,962- | 5,254,886- | c.-105 to -124 |
| | | | | | 5,249,981 | 5,254,905 | |
| 152_-21_NA | 0.02% | 9 | 86.93% | False | chr11: | chr11: | HBG1/2 |
| | | | | | 5,249,954- | 5,254,878- | c.-97 to -117 |
| | | | | | 5,249,974 | 5,254,898 | |
| 165_-39_NA | 0.02% | 9 | 86.95% | False | chr11: | chr11: | HBG1/2 |
| | | | | | 5,249,967- | 5,254,891- | c.-110 to -148 |
| | | | | | 5,250,005 | 5,254,929 | |
| 164_-4_NA | 0.02% | 7 | 86.97% | False | chr11: | chr11: | HBG1/2 |
| | | | | | 5,249,966- | 5,254,890- | c.-109 to -112 |
| | | | | | 5,249,969 | 5,254,893 | |
| 165_-3_NA; | 0.02% | 10 | 86.99% | False | chr11: | chr11: | HBG1/2 |
| 171_-3_NA | | | | | 5,249,967- | 5,254,891- | c.-110 to -112; |
| | | | | | 5,249,969; | 5,254,893; | HBG1/2 |
| | | | | | chr11: | chr11: | c.-116 to -118 |
| | | | | | 5,249,973- | 5,254,897- | |
| | | | | | 5,249,975 | 5,254,899 | |
| 165_-2_NA; | 0.02% | 9 | 87.02% | False | chr11: | chr11: | HBG1/2 |
| 170_-4_NA | | | | | 5,249,967- | 5,254,891- | c.-110 to -111; |
| | | | | | 5,249,968; | 5,254,892; | HBG1/2 |
| | | | | | chr11: | chr11: | c.-115 to -118 |
| | | | | | 5,249,972- | 5,254,896- | |
| | | | | | 5,249,975 | 5,254,899 | |
| 160_-11_NA; | 0.02% | 1 | 87.04% | False | chr11: | chr11: | HBG1/2 |
| 174_-9_NA | | | | | 5,249,962- | 5,254,886- | c.-105 to -115; |
| | | | | | 5,249,972; | 5,254,896; | HBG1/2 |
| | | | | | chr11: | chr11: | c.-119 to -127 |
| | | | | | 5,249,976- | 5,254,900- | |
| | | | | | 5,249,984 | 5,254,908 | |
| 165_-4_NA; | 0.02% | 1 | 87.06% | False | chr11: | chr11: | HBG1/2 |
| 171_1_C | | | | | 5,249,967- | 5,254,891- | c.-110 to -113; |
| | | | | | 5,249,970; | 5,254,894; | HBG1/2 |
| | | | | | chr11: | chr11: | c.-116 to -114 |
| | | | | | 5,249,973- | 5,254,897- | |
| | | | | | 5,249,971 | 5,254,895 | |
| 168_1_A | 0.02% | 8 | 87.08% | False | chr11: | chr11: | HBG1/2 |
| | | | | | 5,249,970- | 5,254,894- | c.-113 to -111 |
| | | | | | 5,249,968 | 5,254,892 | |
| 37_-362_NA | 0.02% | 3 | 87.10% | True | chr11: | chr11: | HBG1/2 |
| | | | | | 5,249,839- | 5,254,763- | c.18 to -343 |
| | | | | | 5,250,200 | 5,255,124 | |
| 152_-54_NA | 0.02% | 7 | 87.12% | True | chr11: | chr11: | HBG1/2 |
| | | | | | 5,249,954- | 5,254,878- | c.-97 to -150 |
| | | | | | 5,250,007 | 5,254,931 | |
| 161_-237_NA | 0.02% | 5 | 87.14% | True | chr11: | chr11: | HBG1/2 |
| | | | | | 5,249,963- | 5,254,887- | c.-106 to -342 |
| | | | | | 5,250,199 | 5,255,123 | |
| 167_-5_NA; | 0.02% | 6 | 87.16% | False | chr11: | chr11: | HBG1/2 |
| 175_-1_NA | | | | | 5,249,969- | 5,254,893- | c.-112 to -116; |
| | | | | | 5,249,973; | 5,254,897; | HBG1/2 |
| | | | | | chr11: | chr11: | c.-120 to -120 |
| | | | | | 5,249,977- | 5,254,901- | |
| | | | | | 5,249,977 | 5,254,901 | |
| 165_-30_NA | 0.02% | 7 | 87.18% | False | chr11: | chr11: | HBG1/2 |
| | | | | | 5,249,967- | 5,254,891- | c.-110 to -139 |
| | | | | | 5,249,996 | 5,254,920 | |
| 167_-17_NA; | 0.02% | 1 | 87.20% | False; | chr11: | chr11: | HBG1/2 |
| 186_-5_NA | | | | True | 5,249,969- | 5,254,893- | c.-112 to -128; |
| | | | | | 5,249,985; | 5,254,909; | HBG1/2 |
| | | | | | chr11: | chr11: | c.-131 to -135 |
| | | | | | 5,249,988- | 5,254,912- | |
| | | | | | 5,249,992 | 5,254,916 | |
| 166_-11_NA; | 0.02% | 10 | 87.22% | False | chr11: | chr11: | HBG1/2 |
| 180_-1_NA | | | | | 5,249,968- | 5,254,892- | c.-111 to -121; |
| | | | | | 5,249,978; | 5,254,902; | HBG1/2 |
| | | | | | chr11: | chr11: | c.-125 to -125 |
| | | | | | 5,249,982- | 5,254,906- | |
| | | | | | 5,249,982 | 5,254,906 | |
| 162_-303_NA | 0.02% | 3 | 87.24% | True | chr11: | chr11: | HBG1/2 |
| | | | | | 5,249,964- | 5,254,888- | c.-107 to -409 |
| | | | | | 5,250,266 | 5,255,190 | |
| 166_-32_NA | 0.02% | 10 | 87.26% | False | chr11: | chr11: | HBG1/2 |
| | | | | | 5,249,968- | 5,254,892- | c.-111 to -142 |
| | | | | | 5,249,999 | 5,254,923 | |
| 165_-32_NA | 0.02% | 9 | 87.28% | False | chr11: | chr11: | HBG1/2 |
| | | | | | 5,249,967- | 5,254,891- | c.-110 to -141 |
| | | | | | 5,249,998 | 5,254,922 | |
| 144_-30_NA | 0.02% | 3 | 87.30% | False | chr11: | chr11: | HBG1/2 |
| | | | | | 5,249,946- | 5,254,870- | c.-89 to -118 |
| | | | | | 5,249,975 | 5,254,899 | |
| 158_-10_NA; | 0.02% | 3 | 87.32% | False | chr11: | chr11: | HBG1/2 |
| 171_-2_NA | | | | | 5,249,960- | 5,254,884- | c.-103 to -112; |
| | | | | | 5,249,969; | 5,254,893; | HBG1/2 |
| | | | | | chr11: | chr11: | c.-116 to -117 |
| | | | | | 5,249,973- | 5,254,897- | |
| | | | | | 5,249,974 | 5,254,898 | |
| 165_-4_NA; | 0.02% | 3 | 87.34% | False | chr11: | chr11: | HBG1/2 |
| 172_-7_NA | | | | | 5,249,967- | 5,254,891- | c.-110 to -113; |
| | | | | | 5,249,970; | 5,254,894; | HBG1/2 |
| | | | | | chr11: | chr11: | c.-117 to -123 |
| | | | | | 5,249,974- | 5,254,898- | |
| | | | | | 5,249,980 | 5,254,904 | |
| 167_-30_NA | 0.02% | 8 | 87.36% | False | chr11: | chr11: | HBG1/2 |
| | | | | | 5,249,969- | 5,254,893- | c.-112 to -141 |
| | | | | | 5,249,998 | 5,254,922 | |
| 169_-2_NA; | 0.02% | 3 | 87.37% | False | chr11: | chr11: | HBG1/2 |
| 173_1_A | | | | | 5,249,971- | 5,254,895- | c.-114 to -115; |
| | | | | | 5,249,972; | 5,254,896; | HBG1/2 |
| | | | | | chr11: | chr11: | c.-118 to -116 |
| | | | | | 5,249,975- | 5,254,899- | |
| | | | | | 5,249,973 | 5,254,897 | |
| 167_-2_NA; | 0.02% | 1 | 87.39% | False | chr11: | chr11: | HBG1/2 |
| 170_4_GCAA | | | | | 5,249,969- | 5,254,893- | c.-112 to -113; |
| | | | | | 5,249,970; | 5,254,894; | HBG1/2 |
| | | | | | chr11: | chr11: | c.-115 to -110 |
| | | | | | 5,249,972- | 5,254,896- | |
| | | | | | 5,249,967 | 5,254,891 | |
| 166_1_C; | 0.02% | 9 | 87.41% | False | chr11: | chr11: | HBG1/2 |
| 167_-4_NA | | | | | 5,249,968- | 5,254,892- | c.-111 to -109; |
| | | | | | 5,249,966; | 5,254,890; | HBG1/2 |
| | | | | | chr11: | chr11: | c.-112 to -115 |
| | | | | | 5,249,969- | 5,254,893- | |
| | | | | | 5,249,972 | 5,254,896 | |
| 170_-24_NA | 0.02% | 11 | 87.43% | False | chr11: | chr11: | HBG1/2 |
| | | | | | 5,249,972- | 5,254,896- | c.-115 to -138 |
| | | | | | 5,249,995 | 5,254,919 | |
| 167_-2_NA; | 0.02% | 10 | 87.44% | False | chr11: | chr11: | HBG1/2 |
| 171_-3_NA | | | | | 5,249,969- | 5,254,893- | c.-112 to -113; |
| | | | | | 5,249,970; | 5,254,894; | HBG1/2 |
| | | | | | chr11: | chr11: | c.-116 to -118 |
| | | | | | 5,249,973- | 5,254,897- | |
| | | | | | 5,249,975 | 5,254,899 | |
| 162_-10_NA; | 0.02% | 1 | 87.46% | False | chr11: | chr11: | HBG1/2 |
| 177_1_T | | | | | 5,249,964- | 5,254,888- | c.-107 to -116; |
| | | | | | 5,249,973; | 5,254,897; | HBG1/2 |
| | | | | | chr11: | chr11: | c.-122 to -120 |
| | | | | | 5,249,979- | 5,254,903- | |
| | | | | | 5,249,977 | 5,254,901 | |
| 124_-288_NA | 0.02% | 1 | 87.48% | True | chr11: | chr11: | HBG1/2 |
| | | | | | 5,249,926- | 5,254,850- | c.-69 to -356 |
| | | | | | 5,250,213 | 5,255,137 | |
| 159_-20_NA | 0.02% | 10 | 87.49% | False | chr11: | chr11: | HBG1/2 |
| | | | | | 5,249,961- | 5,254,885- | c.-104 to -123 |
| | | | | | 5,249,980 | 5,254,904 | |
| 161_-21_NA | 0.02% | 8 | 87.51% | False | chr11: | chr11: | HBG1/2 |
| | | | | | 5,249,963- | 5,254,887- | c.-106 to -126 |
| | | | | | 5,249,983 | 5,254,907 | |
| 160_-7_NA; | 0.02% | 1 | 87.53% | False | chr11: | chr11: | HBG1/2 |
| 169_-2_NA; | | | | | 5,249,962- | 5,254,886- | c.-105 to -111; |
| 173_-2_NA | | | | | 5,249,968; | 5,254,892; | HBG1/2 |
| | | | | | chr11: | chr11: | c.-114 to -115; |
| | | | | | 5,249,971- | 5,254,895- | HBG1/2 |
| | | | | | 5,249,972; | 5,254,896; | c.-118 to -119 |
| | | | | | chr11: | chr11: | |
| | | | | | 5,249,975- | 5,254,899- | |
| | | | | | 5,249,976 | 5,254,900 | |
| 156_-14_NA | 0.02% | 7 | 87.55% | False | chr11: | chr11: | HBG1/2 |
| | | | | | 5,249,958- | 5,254,882- | c.-101 to -114 |
| | | | | | 5,249,971 | 5,254,895 | |
| 159_-272_NA | 0.02% | 1 | 87.56% | True | chr11: | chr11: | HBG1/2 |
| | | | | | 5,249,961- | 5,254,885- | c.-104 to -375 |
| | | | | | 5,250,232 | 5,255,156 | |
| 166_-11_NA; | 0.02% | 6 | 87.58% | False; | chr11: | chr11: | HBG1/2 |
| 180_-4_NA | | | | True | 5,249,968- | 5,254,892- | c.-111 to -121; |
| | | | | | 5,249,978; | 5,254,902; | HBG1/2 |
| | | | | | chr11: | chr11: | c.-125 to -128 |
| | | | | | 5,249,982- | 5,254,906- | |
| | | | | | 5,249,985 | 5,254,909 | |
| 167_8_GAAAAATT; | 0.02% | 1 | 87.59% | False | chr11: | chr11: | HBG1/2 |
| 170_-8_NA | | | | | 5,249,969- | 5,254,893- | c.-112 to -103; |
| | | | | | 5,249,960; | 5,254,884; | HBG1/2 |
| | | | | | chr11: | chr11: | c.-115 to -122 |
| | | | | | 5,249,972- | 5,254,896- | |
| | | | | | 5,249,979 | 5,254,903 | |
| 166_-11_NA; | 0.02% | 2 | 87.61% | False | chr11: | chr11: | HBG1/2 |
| 178_1_G | | | | | 5,249,968- | 5,254,892- | c.-111 to -121; |
| | | | | | 5,249,978; | 5,254,902; | HBG1/2 |
| | | | | | chr11: | chr11: | c.-123 to -121 |
| | | | | | 5,249,980- | 5,254,904- | |
| | | | | | 5,249,978 | 5,254,902 | |
| 169_-8_NA; | 0.02% | 8 | 87.63% | False | chr11: | chr11: | HBG1/2 |
| 180_-1_NA | | | | | 5,249,971- | 5,254,895- | c.-114 to -121; |
| | | | | | 5,249,978; | 5,254,902; | HBG1/2 |
| | | | | | chr11: | chr11: | c.-125 to -125 |
| | | | | | 5,249,982- | 5,254,906- | |
| | | | | | 5,249,982 | 5,254,906 | |
| 158_-11_NA | 0.02% | 6 | 87.64% | False | chr11: | chr11: | HBG1/2 |
| | | | | | 5,249,960- | 5,254,884- | c.-103 to -113 |
| | | | | | 5,249,970 | 5,254,894 | |
| 173_1_T | 0.02% | 3 | 87.66% | False | chr11: | chr11: | HBG1/2 |
| | | | | | 5,249,975- | 5,254,899- | c.-118 to -116 |
| | | | | | 5,249,973 | 5,254,897 | |
| 168_-34_NA | 0.02% | 6 | 87.68% | False | chr11: | chr11: | HBG1/2 |
| | | | | | 5,249,970- | 5,254,894- | c.-113 to -146 |
| | | | | | 5,250,003 | 5,254,927 | |
| 172_-20_NA | 0.02% | 8 | 87.69% | True | chr11: | chr11: | HBG1/2 |
| | | | | | 5,249,974- | 5,254,898- | c.-117 to -136 |
| | | | | | 5,249,993 | 5,254,917 | |
| 166_-275_NA | 0.02% | 1 | 87.71% | False | chr11: | chr11: | HBG1/2 |
| | | | | | 5,249,968- | 5,254,892- | c.-111 to -385 |
| | | | | | 5,250,242 | 5,255,166 | |
| 156_-47_NA | 0.02% | 3 | 87.72% | False | chr11: | chr11: | HBG1/2 |
| | | | | | 5,249,958- | 5,254,882- | c.-101 to -147 |
| | | | | | 5,250,004 | 5,254,928 | |
| 168_-8_NA; | 0.02% | 2 | 87.74% | False | chr11: | chr11: | HBG1/2 |
| 178_-2_NA | | | | | 5,249,970- | 5,254,894- | c.-113 to -120; |
| | | | | | 5,249,977; | 5,254,901; | HBG1/2 |
| | | | | | chr11: | chr11: | c.-123 to -124 |
| | | | | | 5,249,980- | 5,254,904- | |
| | | | | | 5,249,981 | 5,254,905 | |
| 164_-31_NA | 0.02% | 6 | 87.75% | False | chr11: | chr11: | HBG1/2 |
| | | | | | 5,249,966- | 5,254,890- | c.-109 to -139 |
| | | | | | 5,249,996 | 5,254,920 | |
| 159_-318_NA | 0.02% | 2 | 87.77% | True | chr11: | chr11: | HBG1/2 |
| | | | | | 5,249,961- | 5,254,885- | c.-104 to -421 |
| | | | | | 5,250,278 | 5,255,202 | |
| 166_-1_NA; | 0.01% | 1 | 87.78% | False | chr11: | chr11: | HBG1/2 |
| 168_-230_NA | | | | | 5,249,968- | 5,254,892- | c.-111 to -111; |
| | | | | | 5,249,968; | 5,254,892; | HBG1/2 |
| | | | | | chr11: | chr11: | c.-113 to -342 |
| | | | | | 5,249,970- | 5,254,894- | |
| | | | | | 5,250,199 | 5,255,123 | |
| 111_-260_NA | 0.01% | 1 | 87.80% | False | chr11: | chr11: | HBG1/2 |
| | | | | | 5,249,913- | 5,254,837- | c.-56 to -315 |
| | | | | | 5,250,172 | 5,255,096 | |
| 166_-272_NA | 0.01% | 6 | 87.81% | True | chr11: | chr11: | HBG1/2 |
| | | | | | 5,249,968- | 5,254,892- | c.-111 to -382 |
| | | | | | 5,250,239 | 5,255,163 | |
| 166_-4_NA; | 0.01% | 4 | 87.83% | False | chr11: | chr11: | HBG1/2 |
| 171_2_AC | | | | | 5,249,968- | 5,254,892- | c.-111 to -114; |
| | | | | | 5,249,971; | 5,254,895; | HBG1/2 |
| | | | | | chr11: | chr11: | c.-116 to -113 |
| | | | | | 5,249,973- | 5,254,897- | |
| | | | | | 5,249,970 | 5,254,894 | |
| 164_-3_NA; | 0.01% | 1 | 87.84% | False | chr11: | chr11: | HBG1/2 |
| 171_3_GGC | | | | | 5,249,966- | 5,254,890- | c.-109 to -111; |
| | | | | | 5,249,968; | 5,254,892; | HBG1/2 |
| | | | | | chr11: | chr11: | c.-116 to -112 |
| | | | | | 5,249,973- | 5,254,897- | |
| | | | | | 5,249,969 | 5,254,893 | |
| 166_-10_NA; | 0.01% | 4 | 87.86% | False | chr11: | chr11: | HBG1/2 |
| 178_-1_NA | | | | | 5,249,968- | 5,254,892- | c.-111 to -120; |
| | | | | | 5,249,977; | 5,254,901; | HBG1/2 |
| | | | | | chr11: | chr11: | c.-123 to -123 |
| | | | | | 5,249,980- | 5,254,904- | |
| | | | | | 5,249,980 | 5,254,904 | |
| 167_-307_NA | 0.01% | 1 | 87.87% | False | chr11: | chr11: | HBG1/2 |
| | | | | | 5,249,969- | 5,254,893- | c.-112 to -418 |
| | | | | | 5,250,275 | 5,255,199 | |
| 165_-308_NA | 0.01% | 2 | 87.88% | False | chr11: | chr11: | HBG1/2 |
| | | | | | 5,249,967- | 5,254,891- | c.-110 to -417 |
| | | | | | 5,250,274 | 5,255,198 | |
| 158_-2_NA; | 0.01% | 1 | 87.90% | False | chr11: | chr11: | HBG1/2 |
| 162_-9_NA | | | | | 5,249,960- | 5,254,884- | c.-103 to -104; |
| | | | | | 5,249,961; | 5,254,885; | HBG1/2 |
| | | | | | chr11: | chr11: | c.-107 to -115 |
| | | | | | 5,249,964- | 5,254,888- | |
| | | | | | 5,249,972 | 5,254,896 | |
| 155_-22_NA; | 0.01% | 1 | 87.91% | False | chr11: | chr11: | HBG1/2 |
| 182_-1_NA | | | | | 5,249,957- | 5,254,881- | c.-100 to -121; |
| | | | | | 5,249,978; | 5,254,902; | HBG1/2 |
| | | | | | chr11: | chr11: | c.-127 to -127 |
| | | | | | 5,249,984- | 5,254,908- | |
| | | | | | 5,249,984 | 5,254,908 | |
| 138_-32_NA; | 0.01% | 1 | 87.92% | False | chr11: | chr11: | HBG1/2 |
| 174_-3_NA | | | | | 5,249,940- | 5,254,864- | c.-83 to -114; |
| | | | | | 5,249,971; | 5,254,895; | HBG1/2 |
| | | | | | chr11: | chr11: | c.-119 to -121 |
| | | | | | 5,249,976- | 5,254,900- | |
| | | | | | 5,249,978 | 5,254,902 | |
| 140_-52_NA | 0.01% | 2 | 87.94% | False | chr11: | chr11: | HBG1/2 |
| | | | | | 5,249,942- | 5,254,866- | c.-85 to -136 |
| | | | | | 5,249,993 | 5,254,917 | |
| 155_-22_NA | 0.01% | 5 | 87.95% | False | chr11: | chr11: | HBG1/2 |
| | | | | | 5,249,957- | 5,254,881- | c.-100 to -121 |
| | | | | | 5,249,978 | 5,254,902 | |
| 166_-5_NA; | 0.01% | 1 | 87.96% | False | chr11: | chr11: | HBG1/2 |
| 174_-8_NA; | | | | | 5,249,968- | 5,254,892- | c.-111 to -115; |
| 184_-1_NA | | | | | 5,249,972; | 5,254,896; | HBG1/2 |
| | | | | | chr11: | chr11: | c.-119 to -126; |
| | | | | | 5,249,976- | 5,254,900- | HBG1/2 |
| | | | | | 5,249,983; | 5,254,907; | c.-129 to -129 |
| | | | | | chr11: | chr11: | |
| | | | | | 5,249,986- | 5,254,910- | |
| | | | | | 5,249,986 | 5,254,910 | |
| 164_-8_NA; | 0.01% | 5 | 87.97% | False | chr11: | chr11: | HBG1/2 |
| 175_-3_NA | | | | | 5,249,966- | 5,254,890- | c.-109 to -116; |
| | | | | | 5,249,973; | 5,254,897; | HBG1/2 |
| | | | | | chr11: | chr11: | c.-120 to -122 |
| | | | | | 5,249,977- | 5,254,901- | |
| | | | | | 5,249,979 | 5,254,903 | |
| 150_-10_NA; | 0.01% | 1 | 87.99% | False; | chr11: | chr11: | HBG1/2 |
| 162_-7_NA | | | | True | 5,249,952- | 5,254,876- | c.-95 to -104; |
| | | | | | 5,249,961; | 5,254,885; | HBG1/2 |
| | | | | | chr11: | chr11: | c.-107 to -113 |
| | | | | | 5,249,964- | 5,254,888- | |
| | | | | | 5,249,970 | 5,254,894 | |
| 151_-37_NA | 0.01% | 6 | 88.00% | False | chr11: | chr11: | HBG1/2 |
| | | | | | 5,249,953- | 5,254,877- | c.-96 to -132 |
| | | | | | 5,249,989 | 5,254,913 | |
| 156_-270_NA | 0.01% | 1 | 88.01% | True | chr11: | chr11: | HBG1/2 |
| | | | | | 5,249,958- | 5,254,882- | c.-101 to -370 |
| | | | | | 5,250,227 | 5,255,151 | |
| 144_-47_NA | 0.01% | 4 | 88.02% | False | chr11: | chr11: | HBG1/2 |
| | | | | | 5,249,946- | 5,254,870- | c.-89 to -135 |
| | | | | | 5,249,992 | 5,254,916 | |
| 79_-340_NA | 0.01% | 1 | 88.03% | True | chr11: | chr11: | HBG1/2 |
| | | | | | 5,249,881- | 5,254,805- | c.-24 to -363 |
| | | | | | 5,250,220 | 5,255,144 | |
| 166_2_CA; | 0.01% | 3 | 88.05% | False | chr11: | chr11: | HBG1/2 |
| 167_-4_NA | | | | | 5,249,968- | 5,254,892- | c.-111 to -108; |
| | | | | | 5,249,965; | 5,254,889; | HBG1/2 |
| | | | | | chr11: | chr11: | c.-112 to -115 |
| | | | | | 5,249,969- | 5,254,893- | |
| | | | | | 5,249,972 | 5,254,896 | |
| 147_-25_NA | 0.01% | 4 | 88.06% | False | chr11: | chr11: | HBG1/2 |
| | | | | | 5,249,949- | 5,254,873- | c.-92 to -116 |
| | | | | | 5,249,973 | 5,254,897 | |
| 168_-7_NA; | 0.01% | 3 | 88.07% | False | chr11: | chr11: | HBG1/2 |
| 176_1_A | | | | | 5,249,970- | 5,254,894- | c.-113 to -119; |
| | | | | | 5,249,976; | 5,254,900; | HBG1/2 |
| | | | | | chr11: | chr11: | c.-121 to -119 |
| | | | | | 5,249,978- | 5,254,902- | |
| | | | | | 5,249,976 | 5,254,900 | |
| 168_-1_NA; | 0.01% | 1 | 88.08% | False | chr11: | chr11: | HBG1/2 |
| 170_-66_NA | | | | | 5,249,970- | 5,254,894- | c.-113 to -113; |
| | | | | | 5,249,970; | 5,254,894; | HBG1/2 |
| | | | | | chr11: | chr11: | c.-115 to -180 |
| | | | | | 5,249,972- | 5,254,896- | |
| | | | | | 5,250,037 | 5,254,961 | |
| 162_-3_NA; | 0.01% | 2 | 88.09% | False | chr11: | chr11: | HBG1/2 |
| 167_-9_NA | | | | | 5,249,964- | 5,254,888- | c.-107 to -109; |
| | | | | | 5,249,966; | 5,254,890; | HBG1/2 |
| | | | | | chr11: | chr11: | c.-112 to -120 |
| | | | | | 5,249,969- | 5,254,893- | |
| | | | | | 5,249,977 | 5,254,901 | |
| 124_-267_NA | 0.01% | 1 | 88.10% | True | chr11: | chr11: | HBG1/2 |
| | | | | | 5,249,926- | 5,254,850- | c.-69 to -335 |
| | | | | | 5,250,192 | 5,255,116 | |
| 156_-9_NA; | 0.01% | 1 | 88.11% | False | chr11: | chr11: | HBG1/2 |
| 169_-1_NA; | | | | | 5,249,958- | 5,254,882- | c.-101 to -109; |
| 175_-1_NA | | | | | 5,249,966; | 5,254,890; | HBG1/2 |
| | | | | | chr11: | chr11: | c.-114 to -114; |
| | | | | | 5,249,971- | 5,254,895- | HBG1/2 |
| | | | | | 5,249,971; | 5,254,895; | c.-120 to -120 |
| | | | | | chr11: | chr11: | |
| | | | | | 5,249,977- | 5,254,901- | |
| | | | | | 5,249,977 | 5,254,901 | |
| 159_4_TGAC; | 0.01% | 1 | 88.12% | False | chr11: | chr11: | HBG1/2 |
| 162_-3_NA; | | | | | 5,249,961- | 5,254,885- | c.-104 to -99; |
| 167_3_GCC | | | | | 5,249,956; | 5,254,880; | HBG1/2 |
| | | | | | chr11: | chr11: | c.-107 to -109; |
| | | | | | 5,249,964- | 5,254,888- | HBG1/2 |
| | | | | | 5,249,966; | 5,254,890; | c.-112 to -108 |
| | | | | | chr11: | chr11: | |
| | | | | | 5,249,969- | 5,254,893- | |
| | | | | | 5,249,965 | 5,254,889 | |
| 169_-1_NA; | 0.01% | 5 | 88.13% | False | chr11: | chr11: | HBG1/2 |
| 173_-3_NA | | | | | 5,249,971- | 5,254,895- | c.-114 to -114; |
| | | | | | 5,249,971; | 5,254,895; | HBG1/2 |
| | | | | | chr11: | chr11: | c.-118 to -120 |
| | | | | | 5,249,975- | 5,254,899- | |
| | | | | | 5,249,977 | 5,254,901 | |
| 152_-19_NA; | 0.01% | 1 | 88.14% | False | chr11: | chr11: | HBG1/2 |
| 176_-2_NA | | | | | 5,249,954- | 5,254,878- | c.-97 to -115; |
| | | | | | 5,249,972; | 5,254,896; | HBG1/2 |
| | | | | | chr11: | chr11: | c.-121 to -122 |
| | | | | | 5,249,978- | 5,254,902- | |
| | | | | | 5,249,979 | 5,254,903 | |
| 42_-176_NA | 0.01% | 2 | 88.15% | False | chr11: | chr11: | HBG1/2 |
| | | | | | 5,249,844- | 5,254,768- | c.13 to -162 |
| | | | | | 5,250,019 | 5,254,943 | |
| 169_-37_NA | 0.01% | 1 | 88.16% | True | chr11: | chr11: | HBG1/2 |
| | | | | | 5,249,971- | 5,254,895- | c.-114 to -150 |
| | | | | | 5,250,007 | 5,254,931 | |
| 159_-301_NA | 0.01% | 1 | 88.17% | True | chr11: | chr11: | HBG1/2 |
| | | | | | 5,249,961- | 5,254,885- | c.-104 to -404 |
| | | | | | 5,250,261 | 5,255,185 | |
| 169_-64_NA | 0.01% | 5 | 88.18% | True | chr11: | chr11: | HBG1/2 |
| | | | | | 5,249,971- | 5,254,895- | c.-114 to -177 |
| | | | | | 5,250,034 | 5,254,958 | |
| 147_-41_NA | 0.01% | 2 | 88.19% | False | chr11: | chr11: | HBG1/2 |
| | | | | | 5,249,949- | 5,254,873- | c.-92 to -132 |
| | | | | | 5,249,989 | 5,254,913 | |
| 140_-31_NA; | 0.01% | 1 | 88.20% | False | chr11: | chr11: | HBG1/2 |
| 177_-1_NA | | | | | 5,249,942- | 5,254,866- | c.-85 to -115; |
| | | | | | 5,249,972; | 5,254,896; | HBG1/2 |
| | | | | | chr11: | chr11: | c.-122 to -122 |
| | | | | | 5,249,979- | 5,254,903- | |
| | | | | | 5,249,979 | 5,254,903 | |
| 170_-1_NA; | 0.01% | 2 | 88.21% | False | chr11: | chr11: | HBG1/2 |
| 172_-303_NA | | | | | 5,249,972- | 5,254,896- | c.-115 to -115; |
| | | | | | 5,249,972; | 5,254,896; | HBG1/2 |
| | | | | | chr11: | chr11: | c.-117 to -419 |
| | | | | | 5,249,974- | 5,254,898- | |
| | | | | | 5,250,276 | 5,255,200 | |
| 166_-4_NA; | 0.01% | 1 | 88.22% | False | chr11: | chr11: | HBG1/2 |
| 172_-21_NA | | | | | 5,249,968- | 5,254,892- | c.-111 to -114; |
| | | | | | 5,249,971; | 5,254,895; | HBG1/2 |
| | | | | | chr11: | chr11: | c.-117 to -137 |
| | | | | | 5,249,974- | 5,254,898- | |
| | | | | | 5,249,994 | 5,254,918 | |
| 166_-7_NA; | 0.01% | 1 | 88.23% | False | chr11: | chr11: | HBG1/2 |
| 177_2_CC | | | | | 5,249,968- | 5,254,892- | c.-111 to -117; |
| | | | | | 5,249,974; | 5,254,898; | HBG1/2 |
| | | | | | chr11: | chr11: | c.-122 to -119 |
| | | | | | 5,249,979- | 5,254,903- | |
| | | | | | 5,249,976 | 5,254,900 | |
| 152_-254_NA | 0.01% | 1 | 88.23% | True | chr11: | chr11: | HBG1/2 |
| | | | | | 5,249,954- | 5,254,878- | c.-97 to -350 |
| | | | | | 5,250,207 | 5,255,131 | |
| 165_-4_NA; | 0.01% | 3 | 88.24% | False; | chr11: | chr11: | HBG1/2 |
| 172_-5_NA | | | | True | 5,249,967- | 5,254,891- | c.-110 to -113; |
| | | | | | 5,249,970; | 5,254,894; | HBG1/2 |
| | | | | | chr11: | chr11: | c.-117 to -121 |
| | | | | | 5,249,974- | 5,254,898- | |
| | | | | | 5,249,978 | 5,254,902 | |
| 174_-13_NA | 0.01% | 5 | 88.25% | False | chr11: | chr11: | HBG1/2 |
| | | | | | 5,249,976- | 5,254,900- | c.-119 to -131 |
| | | | | | 5,249,988 | 5,254,912 | |
| 154_-17_NA; | 0.01% | 1 | 88.26% | False | chr11: | chr11: | HBG1/2 |
| 175_-6_NA | | | | | 5,249,956- | 5,254,880- | c.-99 to -115; |
| | | | | | 5,249,972; | 5,254,896; | HBG1/2 |
| | | | | | chr11: | chr11: | c.-120 to -125 |
| | | | | | 5,249,977- | 5,254,901- | |
| | | | | | 5,249,982 | 5,254,906 | |
| 161_-9_NA; | 0.01% | 1 | 88.27% | False; | chr11: | chr11: | HBG1/2 |
| 172_-20_NA | | | | True | 5,249,963- | 5,254,887- | c.-106 to -114; |
| | | | | | 5,249,971; | 5,254,895; | HBG1/2 |
| | | | | | chr11: | chr11: | c.-117 to -136 |
| | | | | | 5,249,974- | 5,254,898- | |
| | | | | | 5,249,993 | 5,254,917 | |
| 132_-42_NA | 0.01% | 1 | 88.28% | False | chr11: | chr11: | HBG1/2 |
| | | | | | 5,249,934- | 5,254,858- | c.-77 to -118 |
| | | | | | 5,249,975 | 5,254,899 | |
| 162_-259_NA | 0.01% | 2 | 88.29% | False | chr11: | chr11: | HBG1/2 |
| | | | | | 5,249,964- | 5,254,888- | c.-107 to -365 |
| | | | | | 5,250,222 | 5,255,146 | |
| 166_-18_NA | 0.01% | 2 | 88.29% | True | chr11: | chr11: | HBG1/2 |
| | | | | | 5,249,968- | 5,254,892- | c.-111 to -128 |
| | | | | | 5,249,985 | 5,254,909 | |
| 145_-25_NA | 0.01% | 1 | 88.30% | False | chr11: | chr11: | HBG1/2 |
| | | | | | 5,249,947- | 5,254,871- | c.-90 to -114 |
| | | | | | 5,249,971 | 5,254,895 | |
| 148_-29_NA | 0.01% | 1 | 88.31% | False | chr11: | chr11: | HBG1/2 |
| | | | | | 5,249,950- | 5,254,874- | c.-93 to -121 |
| | | | | | 5,249,978 | 5,254,902 | |
| 144_-327_NA | 0.01% | 1 | 88.32% | False | chr11: | chr11: | HBG1/2 |
| | | | | | 5,249,946- | 5,254,870- | c.-89 to -415 |
| | | | | | 5,250,272 | 5,255,196 | |
| 169_-274_NA | 0.01% | 1 | 88.33% | False | chr11: | chr11: | HBG1/2 |
| | | | | | 5,249,971- | 5,254,895- | c.-114 to -387 |
| | | | | | 5,250,244 | 5,255,168 | |

The Indel_id is a string identifying the indel, shown as indel_start_position+_+indel_length+_+ID.
Where ID is NA for deletions and for insertions is the sequence inserted. Positive values indicate insertions and negative values indicate deletions.
The average percentage (“AVE % in indel”) is the average percentage of each indel_ID amongst all indels detected in a sample. The average is calculated from n = 14 samples.
“Cts” = counts and provides the number of samples in which the indel was identified.
“Cum. Sum” = Cumulative sum and the cumulative percentage of indels, e.g. the top ten most abuntant indels account for 45.03% of all indels.
In the column labeled MMEJ, “True” indicates the repair was mediated via MMEJ, and “False” indicates the repair was mediated via NHEJ.
The genomic coordinates at HBG1 or HBG2 are reported using the One-based coordinate system, “Homo sapiens chromosome 11, GRCh38.p12 Primary Assembly,” (Version NC_000011.10), NCBI Reference Sequence NC_000011.
The HBG1/2 position indicates the deletion relative to the TSS.

### Sequences

[0582] Genome editing system components according to the present disclosure (including without limitation, RNA-guided nucleases, guide RNAs, donor template nucleic acids, nucleic acids encoding nucleases or guide RNAs, and portions or fragments of any of the foregoing), are exemplified by the nucleotide and amino acid sequences presented in the Sequence Listing. The sequences presented in the Sequence Listing are not intended to be limiting, but rather illustrative of certain principles of genome editing systems and their component parts, which, in combination with the instant disclosure, will inform those of skill in the art about additional implementations and modifications that are within the scope of this disclosure. A list of the sequences presented is provided in the following Table 25.

TABLE 25
Sequences presented in the Sequence Listing:

| SEQ ID NOS: | DESCRIPTION |
|---|---|
| 1-2, 4-6, 12, 14 | Cas9 polypeptides |
| 3, 7-11, 13 | Cas9 coding sequences |
| 15-23, 52-123 | Cas9 RuvC-like domains |
| 24-28, 124-198 | Cas9 HNH-like domains |
| 29-31, 38-51 | Full-length modular and |
| | unimolecular gRNAs |
| 32-37 | gRNA proximal and tail domains |
| 199-205 | PAM sequences |
| 251-901, 1002 | gRNA targeting domains (RNA)- |
| | see Table 2, 19, 22, 23 |
| 910-919, 943-945, | gRNA targeting domains (DNA)- |
| 956-959, 1003 | see Tables 7, 9 |
| 920-929, 946-948, | gRNA targeting domains plus PAM |
| 960-963, 1004 | (NGG) (RNA) - see Tables 7, 9 |
| 930-939, 949-951, | gRNA targeting domains plus PAM |
| 964-967, 1005 | (NGG) (DNA) - see Tables 7, 9 |
| 970, 971, 996, 997 | gRNA sequences (DNA)- see Tables |
| | 10,12 |
| 972, 973, 998, 999 | gRNA sequences (DNA)- see Tables |
| | 10, 12 |
| 902, 903 | Human HBG1 and HBG2 promoter |
| | sequences including HPFH deletion site |
| 904-909, 974-995 | Oligonucleotide donor sequences |
| | and homology arms - see Tables 8, 11 |
| 968-969 | BCL11Ae sequences |
| 1006, 1007 | Nuclear Localization Signal sequences |
| 1000, 1001, 1008-1018 | Cpf1 polypeptide sequences |
| 1032-1039 1094-1097, | |
| 1107-1109 | |
| 1019-1021 | Cpf1 nucleotide sequences |
| 1110-1117 | |

### INCORPORATION BY REFERENCE

[0583] All publications, patents, and patent applications mentioned herein are hereby incorporated by reference in their entirety as if each individual publication, patent or patent application was specifically and individually indicated to be incorporated by reference. In case of conflict, the present application, including any definitions herein, will control.

### EQUIVALENTS

[0584] Those skilled in the art will recognize, or be able to ascertain using no more than routine experimentation, many equivalents to the specific embodiments described herein. Such equivalents are intended to be encompassed by the following claims.

### REFERENCES

[0585] Ahern et al., Br J Haematol 25(4):437-444 (1973)
[0586] Akinbami Hemoglobin 40:64-65 (2016)
[0587] Aliyu et al. Am J Hematol 83:63-70 (2008)
[0588] Anders et al. Nature 513(7519):569-573 (2014)
[0589] Angastiniotis & Modell Ann N Y Acad Sci 850:251-269 (1998)
[0590] Bae et al. Bioinformatics 30(10):1473-1475 (2014)
[0591] Barbosa et al. Braz J Med Bio Res 43(8):705-711 (2010)
[0592] Bauer et al. Nat. Med. 25(5):776-783 (2019)
[0593] Bothmer et al. CRISPR J 3(3):177-187 (2020)
[0594] Bouva Hematologica 91(1):129-132 (2006)
[0595] Briner et al. Mol Cell 56(2):333-339 (2014)
[0596] Brousseau Am J Hematol 85(1):77-78 (2010)
[0597] Caldecott Nat Rev Genet 9(8):619-631 (2008)
[0598] Canvers et al. Nature 527(12):192-197 (2015)
[0599] Chang et al. Mol Ther Methods Clin Dev 4:137-148 (2017)
[0600] Chassanidis Ann Hematol 88(6):549-555 (2009)
[0601] Chylinski et al. RNA Biol 10(5):726-737 (2013)
[0602] Cong et al. Science 399(6121):819-823 (2013)
[0603] Costa et al., Cad Saude Publica 18(5):1469-1471 (2002)
[0604] Davis & Maizels 2 Proc Natl Acad Sci USA 111(10):E924-932 (2014)
[0605] Fine et al. Sci Rep. 5:10777 (2015)
[0606] Frit et al. DNA Repair (Amst) 17:81-97 (2014)
[0607] Fu et al. Nat Biotechnol 32:279-284 (2014)
[0608] Gao et al. Nat Biotechnol.: 35(8):789-792 (2017)
[0609] Giarratana et al. Blood:118, 5071-5079 (2011)
[0610] Guilinger et al. Nat Biotechnol 32:577-582 (2014)
[0611] Heigwer et al. Nat Methods 11(2):122-123 (2014)
[0612] Hsu et al. Nat Biotechnol 31(9):827-832 (2013)
[0613] Iyama & Wilson DNA Repair (Amst) 12(8):620-636 (2013)
[0614] Jiang et al. Nat Biotechnol 31(3):233-239 (2013)
[0615] Jinek et al. Science 337(6096):816-821 (2012)
[0616] Jinek et al. Science 343(6176):1247997 (2014)
[0617] Kleinstiver et al. Nature 523(7561):481-485 (2015a)
[0618] Kleinstiver et al. Nat Biotechnol 33(12):1293-1298 (2015b)
[0619] Kleinstiver et al. Nature 529(7587):490-495 (2016)
[0620] Kleinstiver et al. Nat Biotechnol 37(3):276-282 (2019)
[0621] Komor et al. Nature 533(7603):420-424 (2016)
[0622] Lee et al. Nano Lett 12(12):6322-6327 (2012)
[0623] Lewis “Medical-Surgical Nursing: Assessment and Management of Clinical Problems” (2014)
[0624] Li Cell Res 18(1):85-98 (2008)
[0625] Makarova et al. Nat Rev Microbiol 9(6):467-477 (2011)
[0626] Mali et al. Science 339(6121):823-826 (2013)
[0627] Mantovani et al. Nucleic Acids Res 16(16):7783-7797 (1988)
[0628] Marteijn et al. Nat Rev Mol Cell Biol 15(7):465-481 (2014)
[0629] Martyn et al., Biochim Biophys Acta 1860(5):525-536 (2017)
[0630] Métais et al. Blood Adv. 3(21):3379-92 (2019)
[0631] Nishimasu et al. Cell 156(5):935-949 (2014)
[0632] Nishimasu et al. Cell 162:1113-1126 (2015)
[0633] Notta et al. Science 333(6039):218-21 (2011)
[0634] Pausch et al. Science 369(6501):333-337 (2020)
[0635] Ran & Hsu Cell 154(6):1380-1389 (2013)
[0636] Richardson et al. Nat Biotechnol 34:339-344 (2016)
[0637] Swarts et al. May 22:e1481. doi: 10.1002/wrna.1481. Epub ahead of print. PMID: 29790280 (2018)
[0638] Shmakov et al. Molecular Cell 60(3):385-397 (2015)
[0639] Sternberg et al. Nature 507(7490):62-67 (2014)
[0640] Strohkendl et al. Mol. Cell 71:816-824 (2018)
[0641] Superti-Furga et al. EMBO J 7(10):3099-3107 (1988)
[0642] Them Hum Mol Genet 18(R2):R216-223 (2009)
[0643] Thorpe et al. Br J Haematol. 87(1):125-132 (1994)
[0644] Tsai et al. Nat Biotechnol 34(5): 483 (2016)
[0645] Waber et al. Blood 67(2):551-554 (1986)
[0646] Wang et al. Cell 153(4):910-918 (2013)
[0647] Weber et al. Sci Adv. 6(7):eaay9392 (2020)
[0648] Wu et al. Nat. Med. 25(5): 776-83 (2019)
[0649] Xiao et al. Bioinformatics 30(8):1180-1182 (2014)
[0650] Xu et al. Genes Dev 24(8):783-798 (2010)
[0651] Yamano et al. Cell 165(4): 949-962 (2016)
[0652] Zetsche et al. Nat Biotechnol 33(2):139-42 (2015)

The application's sequence listing, which the Patent Office published only in electronic form, follows.

SEQUENCE LISTING (1279 sequences)

SEQ ID NO: 1 - protein, 1345 aa, Streptococcus mutans
  REGION 10..21: note = misc_feature - N-terminal RuvC-like domain
  REGION 759..766: note = misc_feature - RuvC-like domain
  REGION 837..863: note = misc_feature - HNH-like domain
  REGION 982..989: note = misc_feature - RuvC-like domain
MKKPYSIGLDIGTNSVGWAVVTDDYKVPAKKMKVLGNTDKSHIEKNLLGALLFDSGNTAEDRRLKRTARRRYTRRRNRILYLQEIFSEEMGKVDDSFFHRLEDSFLVTEDKRGERHPIFGNLEEEVKYHENFPTIYHLRQYLADNPEKVDLRLVYLALAHIIKFRGHFLIEGKFDTRNNDVQRLFQEFLAVYDNTFENSSLQEQNVQVEEILTDKISKSAKKDRVLKLFPNEKSNGRFAEFLKLIVGNQADFKKHFELEEKAPLQFSKDTYEEELEVLLAQIGDNYAELFLSAKKLYDSILLSGILTVTDVGTKAPLSASMIQRYNEHQMDLAQLKQFIRQKLSDKYNEVFSDVSKDGYAGYIDGKTNQEAFYKYLKGLLNKIEGSGYFLDKIEREDFLRKQRTFDNGSIPHQIHLQEMRAIIRRQAEFYPFLADNQDRIEKLLTFRIPYYVGPLARGKSDFAWLSRKSADKITPWNFDEIVDKESSAEAFINRMTNYDLYLPNQKVLPKHSLLYEKFTVYNELTKVKYKTEQGKTAFFDANMKQEIFDGVFKVYRKVTKDKLMDFLEKEFDEFRIVDLTGLDKENKVFNASYGTYHDLCKILDKDFLDNSKNEKILEDIVLTLTLFEDREMIRKRLENYSDLLTKEQVKKLERRHYTGWGRLSAELIHGIRNKESRKTILDYLIDDGNSNRNFMQLINDDALSFKEEIAKAQVIGETDNLNQVVSDIAGSPAIKKGILQSLKIVDELVKIMGHQPENIVVEMARENQFTNQGRRNSQQRLKGLTDSIKEFGSQILKEHPVENSQLQNDRLFLYYLQNGRDMYTGEELDIDYLSQYDIDHIIPQAFIKDNSIDNRVLTSSKENRGKSDDVPSKDVVRKMKSYWSKLLSAKLITQRKFDNLTKAERGGLTDDDKAGFIKRQLVETRQITKHVARILDERFNTETDENNKKIRQVKIVTLKSNLVSNFRKEFELYKVREINDYHHAHDAYLNAVIGKALLGVYPQLEPEFVYGDYPHFHGHKENKATAKKFFYSNIMNFFKKDDVRTDKNGEIIWKKDEHISNIKKVLSYPQVNIVKKVEEQTGGFSKESILPKGNSDKLIPRKTKKFYWDTKKYGGFDSPIVAYSILVIADIEKGKSKKLKTVKALVGVTIMEKMTFERDPVAFLERKGYRNVQEENIIKLPKYSLFKLENGRKRLLASARELQKGNEIVLPNHLGTLLYHAKNIHKVDEPKHLDYVDKHKDEFKELLDVVSNFSKKYTLAEGNLEKIKELYAQNNGEDLKELASSFINLLTFTAIGAPATFKFFDKNIDRKRYTSTTEILNATLIHQSITGLYETRIDLNKLGGD

SEQ ID NO: 2 - protein, 1368 aa, Streptococcus pyogenes [sequence omitted]

SEQ ID NO: 3 - DNA, 4107 bp, Streptococcus pyogenes
  source 1..4107: mol_type = other DNA
atggataaaaagtacagcatcgggctggacatcggtacaaactcagtggggtgggccgtgattacggacgagtacaaggtaccctccaaaaaatttaaagtgctgggtaacacggacagacactctataaagaaaaatcttattggagccttgctgttcgactcaggcgagacagccgaagccacaaggttgaagcggaccgccaggaggcggtataccaggagaaagaaccgcatatgctacctgcaagaaatcttcagtaacgagatggcaaaggttgacgatagctttttccatcgcctggaagaatcctttcttgttgaggaagacaagaagcacgaacggcaccccatctttggcaatattgtcgacgaagtggcatatcacgaaaagtacccgactatctaccacctcaggaagaagctggtggactctaccgataaggcggacctcagacttatttatttggcactcgcccacatgattaaatttagaggacatttcttgatcgagggcgacctgaacccggacaacagtgacgtcgataagctgttcatccaacttgtgcagacctacaatcaactgttcgaagaaaaccctataaatgcttcaggagtcgacgctaaagcaatcctgtccgcgcgcctctcaaaatctagaagacttgagaatctgattgctcagttgcccggggaaaagaaaaatggattgtttggcaacctgatcgccctcagtctcggactgaccccaaatttcaaaagtaacttcgacctggccgaagacgctaagctccagctgtccaaggacacatacgatgacgacctcgacaatctgctggcccagattggggatcagtacgccgatctctttttggcagcaaagaacctgtccgacgccatcctgttgagcgatatcttgagagtgaacaccgaaattactaaagcaccccttagcgcatctatgatcaagcggtacgacgagcatcatcaggatctgaccctgctgaaggctcttgtgaggcaacagctccccgaaaaatacaaggaaatcttctttgaccagagcaaaaacggctacgctggctatatagatggtggggccagtcaggaggaattctataaattcatcaagcccattctcgagaaaatggacggcacagaggagttgctggtcaaacttaacagggaggacctgctgcggaagcagcggacctttgacaacgggtctatcccccaccagattcatctgggcgaactgcacgcaatcctgaggaggcaggaggatttttatccttttcttaaagataaccgcgagaaaatagaaaagattcttacattcaggatcccgtactacgtgggacctctcgcccggggcaattcacggtttgcctggatgacaaggaagtcagaggagactattacaccttggaacttcgaagaagtggtggacaagggtgcatctgcccagtctttcatcgagcggatgacaaattttgacaagaacctccctaatgagaaggtgctgcccaaacattctctgctctacgagtactttaccgtctacaatgaactgactaaagtcaagtacgtcaccgagggaatgaggaagccggcattccttagtggagaacagaagaaggcgattgtagacctgttgttcaagaccaacaggaaggtgactgtgaagcaacttaaagaagactactttaagaagatcgaatgttttgacagtgtggaaatttcaggggttgaagaccgcttcaatgcgtcattggggacttaccatgatcttctcaagatcataaaggacaaagacttcctggacaacgaagaaaatgaggatattctcgaagacatcgtcctcaccctgaccctgttcgaagacagggaaatgatagaagagcgcttgaaaacctatgcccacctcttcgacgataaagttatgaagcagctgaagcgcaggagatacacaggatggggaagattgtcaaggaagctgatcaatggaattagggataaacagagtggcaagaccatactggatttcctcaaatctgatggcttcgccaataggaacttcatgcaactgattcacgatgactctcttaccttcaaggaggacattcaaaaggctcaggtgagcgggcagggagactcccttcatgaacacatcgcgaatttggcaggttcccccgctattaaaaagggcatccttcaaactgtcaaggtggtggatgaattggtcaaggtaatgggcagacataagccagaaaatattgtgatcgagatggcccgcgaaaaccagaccacacagaagggccagaaaaatagtagagagcggatgaagaggatcgaggagggcatcaaagagctgggatctcagattctcaaagaacaccccgtagaaaacacacagctgcagaacgaaaaattgtacttgtactatctgcagaacggcagagacatgtacgtcgaccaagaacttgatattaatagactgtccgactatgacgtagaccatatcgtgccccagtccttcctgaaggacgactccattgataacaaagtcttgacaagaagcgacaagaacaggggtaaaagtgataatgtgcctagcgaggaggtggtgaaaaaaatgaagaactactggcgacagctgcttaatgcaaagctcattacacaacggaagttcgataatctgacgaaagcagagagaggtggcttgtctgagttggacaaggcagggtttattaagcggcagctggtggaaactaggcagatcacaaagcacgtggcgcagattttggacagccggatgaacacaaaatacgacgaaaatgataaactgatacgagaggtcaaagttatcacgctgaaaagcaagctggtgtccgattttcggaaagacttccagttctacaaagttcgcgagattaataactaccatcatgctcacgatgcgtacctgaacgctgttgtcgggaccgccttgataaagaagtacccaaagctggaatccgagttcgtatacggggattacaaagtgtacgatgtgaggaaaatgatagccaagtccgagcaggagattggaaaggccacagctaagtacttcttttattctaacatcatgaatttttttaagacggaaattaccctggccaacggagagatcagaaagcggccccttatagagacaaatggtgaaacaggtgaaatcgtctgggataagggcagggatttcgctactgtgaggaaggtgctgagtatgccacaggtaaatatcgtgaaaaaaaccgaagtacagaccggaggattttccaaggaaagcattttgcctaaaagaaactcagacaagctcatcgcccgcaagaaagattgggaccctaagaaatacgggggatttgactcacccaccgtagcctattctgtgctggtggtagctaaggtggaaaaaggaaagtctaagaagctgaagtccgtgaaggaactcttgggaatcactatcatggaaagatcatcctttgaaaagaaccctatcgatttcctggaggctaagggttacaaggaggtcaagaaagacctcatcattaaactgccaaaatactctctcttcgagctggaaaatggcaggaagagaatgttggccagcgccggagagctgcaaaagggaaacgagcttgctctgccctccaaatatgttaattttctctatctcgcttcccactatgaaaagctgaaagggtctcccgaagataacgagcagaagcagctgttcgtcgaacagcacaagcactatctggatgaaataatcgaacaaataagcgagttcagcaaaagggttatcctggcggatgctaatttggacaaagtactgtctgcttataacaagcaccgggataagcctattagggaacaagccgagaatataattcacctctttacactcacgaatctcggagcccccgccgccttcaaatactttgatacgactatcgaccggaaacggtataccagtaccaaagaggtcctcgatgccaccctcatccaccagtcaattactggcctgtacgaaacacggatcgacctctctcaactgggcggcgactag

SEQ ID NO: 4 - protein, 1388 aa, Streptococcus thermophilus
  REGION 10..21: note = misc_feature - N-terminal RuvC-like domain
  REGION 760..767: note = misc_feature - RuvC-like domain
  REGION 844..870: note = misc_feature - HNH-like domain
  REGION 989..996: note = misc_feature - RuvC-like domain
MTKPYSIGLDIGTNSVGWAVTTDNYKVPSKKMKVLGNTSKKYIKKNLLGVLLFDSGITAEGRRLKRTARRRYTRRRNRILYLQEIFSTEMATLDDAFFQRLDDSFLVPDDKRDSKYPIFGNLVEEKAYHDEFPTIYHLRKYLADSTKKADLRLVYLALAHMIKYRGHFLIEGEFNSKNNDIQKNFQDFLDTYNAIFESDLSLENSKQLEEIVKDKISKLEKKDRILKLFPGEKNSGIFSEFLKLIVGNQADFRKCFNLDEKASLHFSKESYDEDLETLLGYIGDDYSDVFLKAKKLYDAILLSGFLTVTDNETEAPLSSAMIKRYNEHKEDLALLKEYIRNISLKTYNEVFKDDTKNGYAGYIDGKTNQEDFYVYLKKLLAEFEGADYFLEKIDREDFLRKQRTFDNGSIPYQIHLQEMRAILDKQAKFYPFLAKNKERIEKILTFRIPYYVGPLARGNSDFAWSIRKRNEKITPWNFEDVIDKESSAEAFINRMTSFDLYLPEEKVLPKHSLLYETFNVYNELTKVRFIAESMRDYQFLDSKQKKDIVRLYFKDKRKVTDKDIIEYLHAIYGYDGIELKGIEKQFNSSLSTYHDLLNIINDKEFLDDSSNEAIIEEIIHTLTIFEDREMIKQRLSKFENIFDKSVLKKLSRRHYTGWGKLSAKLINGIRDEKSGNTILDYLIDDGISNRNFMQLIHDDALSFKKKIQKAQIIGDEDKGNIKEVVKSLPGSPAIKKGILQSIKIVDELVKVMGGRKPESIVVEMARENQYTNQGKSNSQQRLKRLEKSLKELGSKILKENIPAKLSKIDNNALQNDRLYLYYLQNGKDMYTGDDLDIDRLSNYDIDHIIPQAFLKDNSIDNKVLVSSASNRGKSDDVPSLEVVKKRKTFWYQLLKSKLISQRKFDNLTKAERGGLSPEDKAGFIQRQLVETRQITKHVARLLDEKFNNKKDENNRAVRTVKIITLKSTLVSQFRKDFELYKVREINDFHHAHDAYLNAVVASALLKKYPKLEPEFVYGDYPKYNSFRERKSATEKVYFYSNIMNIFKKSISLADGRVIERPLIEVNEETGESVWNKESDLATVRRVLSYPQVNVVKKVEEQNHGLDRGKPKGLFNANLSSKPKPNSNENLVGAKEYLDPKKYGGYAGISNSFTVLVKGTIEKGAKKKITNVLEFQGISILDRINYRKDKLNFLLEKGYKDIELIIELPKYSLFELSDGSRRMLASILSTNNKRGEIHKGNQIFLSQKFVKLLYHAKRISNTINENHRKYVENHKKEFEELFYYILEFNENYVGAKKNGKLLNSAFQSWQNHSIDELCSSFIGPTGSERKGLFELTSRGSAADFEFLGVKIPRYRDYTPSSLLKDATLIHQSVTGLYETRIDLAKLGEG

SEQ ID NO: 5 - protein, 1334 aa, Listeria innocua
  REGION 10..21: note = misc_feature - N-terminal RuvC-like domain
  REGION 762..769: note = misc_feature - RuvC-like domain
  REGION 840..866: note = misc_feature - HNH-like domain
  REGION 985..992: note = misc_feature - RuvC-like domain
MKKPYTIGLDIGTNSVGWAVLTDQYDLVKRKMKIAGDSEKKQIKKNFWGVRLFDEGQTAADRRMARTARRRIERRRNRISYLQGIFAEEMSKTDANFFCRLSDSFYVDNEKRNSRHPFFATIEEEVEYHKNYPTIYHLREELVNSSEKADLRLVYLALAHIIKYRGNFLIEGALDTQNTSVDGIYKQFIQTYNQVFASGIEDGSLKKLEDNKDVAKILVEKVTRKEKLERILKLYPGEKSAGMFAQFISLIVGSKGNFQKPFDLIEKSDIECAKDSYEEDLESLLALIGDEYAELFVAAKNAYSAVVLSSIITVAETETNAKLSASMIERFDTHEEDLGELKAFIKLHLPKHYEEIFSNTEKHGYAGYIDGKTKQADFYKYMKMTLENIEGADYFIAKIEKENFLRKQRTFDNGAIPHQLHLEELEAILHQQAKYYPFLKENYDKIKSLVTFRIPYFVGPLANGQSEFAWLTRKADGEIRPWNIEEKVDFGKSAVDFIEKMTNKDTYLPKENVLPKHSLCYQKYLVYNELTKVRYINDQGKTSYFSGQEKEQIFNDLFKQKRKVKKKDLELFLRNMSHVESPTIEGLEDSFNSSYSTYHDLLKVGIKQEILDNPVNTEMLENIVKILTVFEDKRMIKEQLQQFSDVLDGVVLKKLERRHYTGWGRLSAKLLMGIRDKQSHLTILDYLMNDDGLNRNLMQLINDSNLSFKSIIEKEQVTTADKDIQSIVADLAGSPAIKKGILQSLKIVDELVSVMGYPPQTIVVEMARENQTTGKGKNNSRPRYKSLEKAIKEFGSQILKEHPTDNQELRNNRLYLYYLQNGKDMYTGQDLDIHNLSNYDIDHIVPQSFITDNSIDNLVLTSSAGNREKGDDVPPLEIVRKRKVFWEKLYQGNLMSKRKFDYLTKAERGGLTEADKARFIHRQLVETRQITKNVANILHQRFNYEKDDHGNTMKQVRIVTLKSALVSQFRKQFQLYKVRDVNDYHHAHDAYLNGVVANTLLKVYPQLEPEFVYGDYHQFDWFKANKATAKKQFYTNIMLFFAQKDRIIDENGEILWDKKYLDTVKKVMSYRQMNIVKKTEIQKGEFSKATIKPKGNSSKLIPRKTNWDPMKYGGLDSPNMAYAVVIEYAKGKNKLVFEKKIIRVTIMERKAFEKDEKAFLEEQGYRQPKVLAKLPKYTLYECEEGRRRMLASANEAQKGNQQVLPNHLVTLLHHAANCEVSDGKSLDYIESNREMFAELLAHVSEFAKRYTLAEANLNKINQLFEQNKEGDIKAIAQSFVDLMAFNAMGAPASFKFFETTIERKRYNNLKELLNSTIIYQSITGLYESRKRLDD

SEQ ID NO: 6 - protein, 1053 aa, Staphylococcus aureus
MKRNYILGLDIGITSVGYGIIDYETRDVIDAGVRLFKEANVENNEGRRSKRGARRLKRRRRHRIQRVKKLLFDYNLLTDHSELSGINPYEARVKGLSQKLSEEEFSAALLHLAKRRGVHNVNEVEEDTGNELSTKEQISRNSKALEEKYVAELQLERLKKDGEVRGSINRFKTSDYVKEAKQLLKVQKAYHQLDQSFIDTYIDLLETRRTYYEGPGEGSPFGWKDIKEWYEMLMGHCTYFPEELRSVKYAYNADLYNALNDLNNLVITRDENEKLEYYEKFQIIENVFKQKKKPTLKQIAKEILVNEEDIKGYRVTSTGKPEFTNLKVYHDIKDITARKEIIENAELLDQIAKILTIYQSSEDIQEELTNLNSELTQEEIEQISNLKGYTGTHNLSLKAINLILDELWHTNDNQIAIFNRLKLVPKKVDLSQQKEIPTTLVDDFILSPVVKRSFIQSIKVINAIIKKYGLPNDIIIELAREKNSKDAQKMINEMQKRNRQTNERIEEIIRTTGKENAKYLIEKIKLHDMQEGKCLYSLEAIPLEDLLNNPFNYEVDHIIPRSVSFDNSFNNKVLVKQEENSKKGNRTPFQYLSSSDSKISYETFKKHILNLAKGKGRISKTKKEYLLEERDINRFSVQKDFINRNLVDTRYATRGLMNLLRSYFRVNNLDVKVKSINGGFTSFLRRKWKFKKERNKGYKHHAEDALIIANADFIFKEWKKLDKAKKVMENQMFEEKQAESMPEIETEQEYKEIFITPHQIKHIKDFKDYKYSHRVDKKPNRELINDTLYSTRKDDKGNTLIVNNLNGLYDKDNDKLKKLINKSPEKLLMYHHDPQTYQKLKLIMEQYGDEKNPLYKYYEETGNYLTKYSKKDNGPVIKKIKYYGNKLNAHLDITDDYPNSRNKVVKLSLKPYRFDVYLDNGVYKFVTVKNLDVIKKENYYEVNSKCYEEAKKLKKISNQAEFIASFYNNDLIKINGELYRVIGVNNDLLNRIEVNMIDITYREYLENMNDKRPPRIIKTIASKTQSIKKYSTDILGNLYEVKSKKHPQIIKKG

SEQ ID NO: 7 - DNA, 3159 bp, Staphylococcus aureus
  source 1..3159: mol_type = other DNA
atgaaaaggaactacattctggggctggacatcgggattacaagcgtggggtatgggattattgactatgaaacaagggacgtgatcgacgcaggcgtcagactgttcaaggaggccaacgtggaaaacaatgagggacggagaagcaagaggggagccaggcgcctgaaacgacggagaaggcacagaatccagagggtgaagaaactgctgttcgattacaacctgctgaccgaccattctgagctgagtggaattaatccttatgaagccagggtgaaaggcctgagtcagaagctgtcagaggaagagttttccgcagctctgctgcacctggctaagcgccgaggagtgcataacgtcaatgaggtggaagaggacaccggcaacgagctgtctacaaaggaacagatctcacgcaatagcaaagctctggaagagaagtatgtcgcagagctgcagctggaacggctgaagaaagatggcgaggtgagagggtcaattaataggttcaagacaagcgactacgtcaaagaagccaagcagctgctgaaagtgcagaaggcttaccaccagctggatcagagcttcatcgatacttatatcgacctgctggagactcggagaacctactatgagggaccaggagaagggagccccttcggatggaaagacatcaaggaatggtacgagatgctgatgggacattgcacctattttccagaagagctgagaagcgtcaagtacgcttataacgcagatctgtacaacgccctgaatgacctgaacaacctggtcatcaccagggatgaaaacgagaaactggaatactatgagaagttccagatcatcgaaaacgtgtttaagcagaagaaaaagcctacactgaaacagattgctaaggagatcctggtcaacgaagaggacatcaagggctaccgggtgacaagcactggaaaaccagagttcaccaatctgaaagtgtatcacgatattaaggacatcacagcacggaaagaaatcattgagaacgccgaactgctggatcagattgctaagatcctgactatctaccagagctccgaggacatccaggaagagctgactaacctgaacagcgagctgacccaggaagagatcgaacagattagtaatctgaaggggtacaccggaacacacaacctgtccctgaaagctatcaatctgattctggatgagctgtggcatacaaacgacaatcagattgcaatctttaaccggctgaagctggtcccaaaaaaggtggacctgagtcagcagaaagagatcccaaccacactggtggacgatttcattctgtcacccgtggtcaagcggagcttcatccagagcatcaaagtgatcaacgccatcatcaagaagtacggcctgcccaatgatatcattatcgagctggctagggagaagaacagcaaggacgcacagaagatgatcaatgagatgcagaaacgaaaccggcagaccaatgaacgcattgaagagattatccgaactaccgggaaagagaacgcaaagtacctgattgaaaaaatcaagctgcacgatatgcaggagggaaagtgtctgtattctctggaggccatccccctggaggacctgctgaacaatccattcaactacgaggtcgatcatattatccccagaagcgtgtccttcgacaattcctttaacaacaaggtgctggtcaagcaggaagagaactctaaaaagggcaataggactcctttccagtacctgtctagttcagattccaagatctcttacgaaacctttaaaaagcacattctgaatctggccaaaggaaagggccgcatcagcaagaccaaaaaggagtacctgctggaagagcgggacatcaacagattctccgtccagaaggattttattaaccggaatctggtggacacaagatacgctactcgcggcctgatgaatctgctgcgatcctatttccgggtgaacaatctggatgtgaaagtcaagtccatcaacggcgggttcacatcttttctgaggcgcaaatggaagtttaaaaaggagcgcaacaaagggtacaagcaccatgccgaagatgctctgattatcgcaaatgccgacttcatctttaaggagtggaaaaagctggacaaagccaagaaagtgatggagaaccagatgttcgaagagaagcaggccgaatctatgcccgaaatcgagacagaacaggagtacaaggagattttcatcactcctcaccagatcaagcatatcaaggatttcaaggactacaagtactctcaccgggtggataaaaagcccaacagagagctgatcaatgacaccctgtatagtacaagaaaagacgataaggggaataccctgattgtgaacaatctgaacggactgtacgacaaagataatgacaagctgaaaaagctgatcaacaaaagtcccgagaagctgctgatgtaccaccatgatcctcagacatatcagaaactgaagctgattatggagcagtacggcgacgagaagaacccactgtataagtactatgaagagactgggaactacctgaccaagtatagcaaaaaggataatggccccgtgatcaagaagatcaagtactatgggaacaagctgaatgcccatctggacatcacagacgattaccctaacagtcgcaacaaggtggtcaagctgtcactgaagccatacagattcgatgtctatctggacaacggcgtgtataaatttgtgactgtcaagaatctggatgtcatcaaaaaggagaactactatgaagtgaatagcaagtgctacgaagaggctaaaaagctgaaaaagattagcaaccaggcagagttcatcgcctccttttacaacaacgacctgattaagatcaatggcgaactgtatagggtcatcggggtgaacaatgatctgctgaaccgcattgaagtgaatatgattgacatcacttaccgagagtatctggaaaacatgaatgataagcgcccccctcgaattatcaaaacaattgcctctaagactcagagtatcaaaaagtactcaaccgacattctgggaaacctgtatgaggtgaagagcaaaaagcaccctcagattatcaaaaagggc

SEQ ID NO: 8 - DNA, 3159 bp, Staphylococcus aureus
  source 1..3159: mol_type = other DNA
atgaagcggaactacatcctgggcctggacatcggcatcaccagcgtgggctacggcatcatcgactacgagacacgggacgtgatcgatgccggcgtgcggctgttcaaagaggccaacgtggaaaacaacgagggcaggcggagcaagagaggcgccagaaggctgaagcggcggaggcggcatagaatccagagagtgaagaagctgctgttcgactacaacctgctgaccgaccacagcgagctgagcggcatcaacccctacgaggccagagtgaagggcctgagccagaagctgagcgaggaagagttctctgccgccctgctgcacctggccaagagaagaggcgtgcacaacgtgaacgaggtggaagaggacaccggcaacgagctgtccaccaaagagcagatcagccggaacagcaaggccctggaagagaaatacgtggccgaactgcagctggaacggctgaagaaagacggcgaagtgcggggcagcatcaacagattcaagaccagcgactacgtgaaagaagccaaacagctgctgaaggtgcagaaggcctaccaccagctggaccagagcttcatcgacacctacatcgacctgctggaaacccggcggacctactatgagggacctggcgagggcagccccttcggctggaaggacatcaaagaatggtacgagatgctgatgggccactgcacctacttccccgaggaactgcggagcgtgaagtacgcctacaacgccgacctgtacaacgccctgaacgacctgaacaatctcgtgatcaccagggacgagaacgagaagctggaatattacgagaagttccagatcatcgagaacgtgttcaagcagaagaagaagcccaccctgaagcagatcgccaaagaaatcctcgtgaacgaagaggatattaagggctacagagtgaccagcaccggcaagcccgagttcaccaacctgaaggtgtaccacgacatcaaggacattaccgcccggaaagagattattgagaacgccgagctgctggatcagattgccaagatcctgaccatctaccagagcagcgaggacatccaggaagaactgaccaatctgaactccgagctgacccaggaagagatcgagcagatctctaatctgaagggctataccggcacccacaacctgagcctgaaggccatcaacctgatcctggacgagctgtggcacaccaacgacaaccagatcgctatcttcaaccggctgaagctggtgcccaagaaggtggacctgtcccagcagaaagagatccccaccaccctggtggacgacttcatcctgagccccgtcgtgaagagaagcttcatccagagcatcaaagtgatcaacgccatcatcaagaagtacggcctgcccaacgacatcattatcgagctggcccgcgagaagaactccaaggacgcccagaaaatgatcaacgagatgcagaagcggaaccggcagaccaacgagcggatcgaggaaatcatccggaccaccggcaaagagaacgccaagtacctgatcgagaagatcaagctgcacgacatgcaggaaggcaagtgcctgtacagcctggaagccatccctctggaagatctgctgaacaaccccttcaactatgaggtggaccacatcatccccagaagcgtgtccttcgacaacagcttcaacaacaaggtgctcgtgaagcaggaagaaaacagcaagaagggcaaccggaccccattccagtacctgagcagcagcgacagcaagatcagctacgaaaccttcaagaagcacatcctgaatctggccaagggcaagggcagaatcagcaagaccaagaaagagtatctgctggaagaacgggacatcaacaggttctccgtgcagaaagacttcatcaaccggaacctggtggataccagatacgccaccagaggcctgatgaacctgctgcggagctacttcagagtgaacaacctggacgtgaaagtgaagtccatcaatggcggcttcaccagctttctgcggcggaagtggaagtttaagaaagagcggaacaaggggtacaagcaccacgccgaggacgccctgatcattgccaacgccgatttcatcttcaaagagtggaagaaactggacaaggccaaaaaagtgatggaaaaccagatgttcgaggaaaagcaggccgagagcatgcccgagatcgaaaccgagcaggagtacaaagagatcttcatcaccccccaccagatcaagcacattaaggacttcaaggactacaagtacagccaccgggtggacaagaagcctaatagagagctgattaacgacaccctgtactccacccggaaggacgacaagggcaacaccctgatcgtgaacaatctgaacggcctgtacgacaaggacaatgacaagctgaaaaagctgatcaacaagagccccgaaaagctgctgatgtaccaccacgacccccagacctaccagaaactgaagctgattatggaacagtacggcgacgagaagaatcccctgtacaagtactacgaggaaaccgggaactacctgaccaagtactccaaaaaggacaacggccccgtgatcaagaagattaagtattacggcaacaaactgaacgcccatctggacatcaccgacgactaccccaacagcagaaacaaggtcgtgaagctgtccctgaagccctacagattcgacgtgtacctggacaatggcgtgtacaagttcgtgaccgtgaagaatctggatgtgatcaaaaaagaaaactactacgaagtgaatagcaagtgctatgaggaagctaagaagctgaagaagatcagcaaccaggccgagtttatcgcctccttctacaacaacgatctgatcaagatcaacggcgagctgtatagagtgatcggcgtgaacaacgacctgctgaaccggatcgaagtgaacatgatcgacatcacctaccgcgagtacctggaaaacatgaacgacaagaggccccccaggatcattaagacaatcgcctccaagacccagagcattaagaagtacagcacagacattctgggcaacctgtatgaagtgaaatctaagaagcaccctcagatcatcaaaaagggc

SEQ ID NO: 9 - DNA, 3159 bp, Staphylococcus aureus
  source 1..3159: mol_type = other DNA
atgaagcgcaactacatcctcggactggacatcggcattacctccgtgggatacggcatcatcgattacgaaactagggatgtgatcgacgctggagtcaggctgttcaaagaggcgaacgtggagaacaacgaggggcggcgctcaaagaggggggcccgccggctgaagcgccgccgcagacatagaatccagcgcgtgaagaagctgctgttcgactacaaccttctgaccgaccactccgaactttccggcatcaacccatatgaggctagagtgaagggattgtcccaaaagctgtccgaggaagagttctccgccgcgttgctccacctcgccaagcgcaggggagtgcacaatgtgaacgaagtggaagaagataccggaaacgagctgtccaccaaggagcagatcagccggaactccaaggccctggaagagaaatacgtggcggaactgcaactggagcggctgaagaaagacggagaagtgcgcggctcgatcaaccgcttcaagacctcggactacgtgaaggaggccaagcagctcctgaaagtgcaaaaggcctatcaccaacttgaccagtcctttatcgatacctacatcgatctgctcgagactcggcggacttactacgagggtccaggggagggctccccatttggttggaaggatattaaggagtggtacgaaatgctgatgggacactgcacatacttccctgaggagctgcggagcgtgaaatacgcatacaacgcagacctgtacaacgcgctgaacgacctgaacaatctcgtgatcacccgggacgagaacgaaaagctcgagtattacgaaaagttccagattattgagaacgtgttcaaacagaagaagaagccgacactgaagcagattgccaaggaaatcctcgtgaacgaagaggacatcaagggctatcgagtgacctcaacgggaaagccggagttcaccaatctgaaggtctaccacgacatcaaagacattaccgcccggaaggagatcattgagaacgcggagctgttggaccagattgcgaagattctgaccatctaccaatcctccgaggatattcaggaagaactcaccaacctcaacagcgaactgacccaggaggagatagagcaaatctccaacctgaagggctacaccggaactcataacctgagcctgaaggccatcaacttgatcctggacgagctgtggcacaccaacgataaccagatcgctattttcaatcggctgaagctggtccccaagaaagtggacctctcacaacaaaaggagatccctactacccttgtggacgatttcattctgtcccccgtggtcaagagaagcttcatacagtcaatcaaagtgatcaatgccattatcaagaaatacggtctgcccaacgacattatcattgagctcgcccgcgagaagaactcgaaggacgcccagaagatgattaacgaaatgcagaagaggaaccgacagactaacgaacggatcgaagaaatcatccggaccaccgggaaggaaaacgcgaagtacctgatcgaaaagatcaagctccatgacatgcaggaaggaaagtgtctgtactcgctggaggccattccgctggaggacttgctgaacaacccttttaactacgaagtggatcatatcattccgaggagcgtgtcattcgacaattccttcaacaacaaggtcctcgtgaagcaggaggaaaactcgaagaagggaaaccgcacgccgttccagtacctgagcagcagcgactccaagatttcctacgaaaccttcaagaagcacatcctcaacctggcaaaggggaagggtcgcatctccaagaccaagaaggaatatctgctggaagaaagagacatcaacagattctccgtgcaaaaggacttcatcaaccgcaacctcgtggatactagatacgctactcggggtctgatgaacctcctgagaagctactttagagtgaacaatctggacgtgaaggtcaagtcgattaacggaggtttcacctccttcctgcggcgcaagtggaagttcaagaaggaacggaacaagggctacaagcaccacgccgaggacgccctgatcattgccaacgccgacttcatcttcaaagaatggaagaaacttgacaaggctaagaaggtcatggaaaaccagatgttcgaagaaaagcaggccgagtctatgcctgaaatcgagactgaacaggagtacaaggaaatctttattacgccacaccagatcaaacacatcaaggatttcaaggattacaagtactcacatcgcgtggacaaaaagccgaacagggaactgatcaacgacaccctctactccacccggaaggatgacaaagggaataccctcatcgtcaacaaccttaacggcctgtacgacaaggacaacgataagctgaagaagctcattaacaagtcgcccgaaaagttgctgatgtaccaccacgaccctcagacttaccagaagctcaagctgatcatggagcagtatggggacgagaaaaacccgttgtacaagtactacgaagaaactgggaattatctgactaagtactccaagaaagataacggccccgtgattaagaagattaagtactacggcaacaagctgaacgcccatctggacatcaccgatgactaccctaattcccgcaacaaggtcgtcaagctgagcctcaagccctaccggtttgatgtgtaccttgacaatggagtgtacaagttcgtgactgtgaagaaccttgacgtgatcaagaaggagaactactacgaagtcaactccaagtgctacgaggaagcaaagaagttgaagaagatctcgaaccaggccgagttcattgcctccttctataacaacgacctgattaagatcaacggcgaactgtaccgcgtcattggcgtgaacaacgatctcctgaaccgcatcgaagtgaacatgatcgacatcacttaccgggaatacctggagaatatgaacgacaagcgcccgccccggatcattaagactatcgcctcaaagacccagtcgatcaagaagtacagcaccgacatcctgggcaacctgtacgaggtcaaatcgaagaagcacccccagatcatcaagaaggga

SEQ ID NO: 10 - DNA, 3159 bp, Staphylococcus aureus
  source 1..3159: mol_type = other DNA
atgaaaaggaactacattctggggctggccatcgggattacaagcgtggggtatgggattattgactatgaaacaagggacgtgatcgacgcaggcgtcagactgttcaaggaggccaacgtggaaaacaatgagggacggagaagcaagaggggagccaggcgcctgaaacgacggagaaggcacagaatccagagggtgaagaaactgctgttcgattacaacctgctgaccgaccattctgagctgagtggaattaatccttatgaagccagggtgaaaggcctgagtcagaagctgtcagaggaagagttttccgcagctctgctgcacctggctaagcgccgaggagtgcataacgtcaatgaggtggaagaggacaccggcaacgagctgtctacaaaggaacagatctcacgcaatagcaaagctctggaagagaagtatgtcgcagagctgcagctggaacggctgaagaaagatggcgaggtgagagggtcaattaataggttcaagacaagcgactacgtcaaagaagccaagcagctgctgaaagtgcagaaggcttaccaccagctggatcagagcttcatcgatacttatatcgacctgctggagactcggagaacctactatgagggaccaggagaagggagccccttcggatggaaagacatcaaggaatggtacgagatgctgatgggacattgcacctattttccagaagagctgagaagcgtcaagtacgcttataacgcagatctgtacaacgccctgaatgacctgaacaacctggtcatcaccagggatgaaaacgagaaactggaatactatgagaagttccagatcatcgaaaacgtgtttaagcagaagaaaaagcctacactgaaacagattgctaaggagatcctggtcaacgaagaggacatcaagggctaccgggtgacaagcactggaaaaccagagttcaccaatctgaaagtgtatcacgatattaaggacatcacagcacggaaagaaatcattgagaacgccgaactgctggatcagattgctaagatcctgactatctaccagagctccgaggacatccaggaagagctgactaacctgaacagcgagctgacccaggaagagatcgaacagattagtaatctgaaggggtacaccggaacacacaacctgtccctgaaagctatcaatctgattctggatgagctgtggcatacaaacgacaatcagattgcaatctttaaccggctgaagctggtcccaaaaaaggtggacctgagtcagcagaaagagatcccaaccacactggtggacgatttcattctgtcacccgtggtcaagcggagcttcatccagagcatcaaagtgatcaacgccatcatcaagaagtacggcctgcccaatgatatcattatcgagctggctagggagaagaacagcaaggacgcacagaagatgatcaatgagatgcagaaacgaaaccggcagaccaatgaacgcattgaagagattatccgaactaccgggaaagagaacgcaaagtacctgattgaaaaaatcaagctgcacgatatgcaggagggaaagtgtctgtattctctggaggccatccccctggaggacctgctgaacaatccattcaactacgaggtcgatcatattatccccagaagcgtgtccttcgacaattcctttaacaacaaggtgctggtcaagcaggaagagaactctaaaaagggcaataggactcctttccagtacctgtctagttcagattccaagatctcttacgaaacctttaaaaagcacattctgaatctggccaaaggaaagggccgcatcagcaagaccaaaaaggagtacctgctggaagagcgggacatcaacagattctccgtccagaaggattttattaaccggaatctggtggacacaagatacgctactcgcggcctgatgaatctgctgcgatcctatttccgggtgaacaatctggatgtgaaagtcaagtccatcaacggcgggttcacatcttttctgaggcgcaaatggaagtttaaaaaggagcgcaacaaagggtacaagcaccatgccgaagatgctctgattatcgcaaatgccgacttcatctttaaggagtggaaaaagctggacaaagccaagaaagtgatggagaaccagatgttcgaagagaagcaggccgaatctatgcccgaaatcgagacagaacaggagtacaaggagattttcatcactcctcaccagatcaagcatatcaaggatttcaaggactacaagtactctcaccgggtggataaaaagcccaacagagagctgatcaatgacaccctgtatagtacaagaaaagacgataaggggaataccctgattgtgaacaatctgaacggactgtacgacaaagataatgacaagctgaaaaagctgatcaacaaaagtcccgagaagctgctgatgtaccaccatgatcctcagacatatcagaaactgaagctgattatggagcagtacggcgacgagaagaacccactgtataagtactatgaagagactgggaactacctgaccaagtatagcaaaaaggataatggccccgtgatcaagaagatcaagtactatgggaacaagctgaatgcccatctggacatcacagacgattaccctaacagtcgcaacaaggtggtcaagctgtcactgaagccatacagattcgatgtctatctggacaacggcgtgtataaatttgtgactgtcaagaatctggatgtcatcaaaaaggagaactactatgaagtgaatagcaagtgctacgaagaggctaaaaagctgaaaaagattagcaaccaggcagagttcatcgcctccttttacaacaacgacctgattaagatcaatggcgaactgtatagggtcatcggggtgaacaatgatctgctgaaccgcattgaagtgaatatgattgacatcacttaccgagagtatctggaaaacatgaatgataagcgcccccctcgaattatcaaaacaattgcctctaagactcagagtatcaaaaagtactcaaccgacattctgggaaacctgtatgaggtgaagagcaaaaagcaccctcagattatcaaaaagggc

SEQ ID NO: 11 - DNA, 3159 bp, Staphylococcus aureus
  source 1..3159: mol_type = other DNA
atgaaaaggaactacattctggggctggacatcgggattacaagcgtggggtatgggattattgactatgaaacaagggacgtgatcgacgcaggcgtcagactgttcaaggaggccaacgtggaaaacaatgagggacggagaagcaagaggggagccaggcgcctgaaacgacggagaaggcacagaatccagagggtgaagaaactgctgttcgattacaacctgctgaccgaccattctgagctgagtggaattaatccttatgaagccagggtgaaaggcctgagtcagaagctgtcagaggaagagttttccgcagctctgctgcacctggctaagcgccgaggagtgcataacgtcaatgaggtggaagaggacaccggcaacgagctgtctacaaaggaacagatctcacgcaatagcaaagctctggaagagaagtatgtcgcagagctgcagctggaacggctgaagaaagatggcgaggtgagagggtcaattaataggttcaagacaagcgactacgtcaaagaagccaagcagctgctgaaagtgcagaaggcttaccaccagctggatcagagcttcatcgatacttatatcgacctgctggagactcggagaacctactatgagggaccaggagaagggagccccttcggatggaaagacatcaaggaatggtacgagatgctgatgggacattgcacctattttccagaagagctgagaagcgtcaagtacgcttataacgcagatctgtacaacgccctgaatgacctgaacaacctggtcatcaccagggatgaaaacgagaaactggaatactatgagaagttccagatcatcgaaaacgtgtttaagcagaagaaaaagcctacactgaaacagattgctaaggagatcctggtcaacgaagaggacatcaagggctaccgggtgacaagcactggaaaaccagagttcaccaatctgaaagtgtatcacgatattaaggacatcacagcacggaaagaaatcattgagaacgccgaactgctggatcagattgctaagatcctgactatctaccagagctccgaggacatccaggaagagctgactaacctgaacagcgagctgacccaggaagagatcgaacagattagtaatctgaaggggtacaccggaacacacaacctgtccctgaaagctatcaatctgattctggatgagctgtggcatacaaacgacaatcagattgcaatctttaaccggctgaagctggtcccaaaaaaggtggacctgagtcagcagaaagagatcccaaccacactggtggacgatttcattctgtcacccgtggtcaagcggagcttcatccagagcatcaaagtgatcaacgccatcatcaagaagtacggcctgcccaatgatatcattatcgagctggctagggagaagaacagcaaggacgcacagaagatgatcaatgagatgcagaaacgaaaccggcagaccaatgaacgcattgaagagattatccgaactaccgggaaagagaacgcaaagtacctgattgaaaaaatcaagctgcacgatatgcaggagggaaagtgtctgtattctctggaggccatccccctggaggacctgctgaacaatccattcaactacgaggtcgatcatattatccccagaagcgtgtccttcgacaattcctttaacaacaaggtgctggtcaagcaggaagaggcctctaaaaagggcaataggactcctttccagtacctgtctagttcagattccaagatctcttacgaaacctttaaaaagcacattctgaatctggccaaaggaaagggccgcatcagcaagaccaaaaaggagtacctgctggaagagcgggacatcaacagattctccgtccagaaggattttattaaccggaatctggtggacacaagatacgctactcgcggcctgatgaatctgctgcgatcctatttccgggtgaacaatctggatgtgaaagtcaagtccatcaacggcgggttcacatcttttctgaggcgcaaatggaagtttaaaaaggagcgcaacaaagggtacaagcaccatgccgaagatgctctgattatcgcaaatgccgacttcatctttaaggagtggaaaaagctggacaaagccaagaaagtgatggagaaccagatgttcgaagagaagcaggccgaatctatgcccgaaatcgagacagaacaggagtacaaggagattttcatcactcctcaccagatcaagcatatcaaggatttcaaggactacaagtactctcaccgggtggataaaaagcccaacagagagctgatcaatgacaccctgtatagtacaagaaaagacgataaggggaataccctgattgtgaacaatctgaacggactgtacgacaaagataatgacaagctgaaaaagctgatcaacaaaagtcccgagaagctgctgatgtaccaccatgatcctcagacatatcagaaactgaagctgattatggagcagtacggcgacgagaagaacccactgtataagtactatgaagagactgggaactacctgaccaagtatagcaaaaaggataatggccccgtgatcaagaagatcaagtactatgggaacaagctgaatgcccatctggacatcacagacgattaccctaacagtcgcaacaaggtggtcaagctgtcactgaagccatacagattcgatgtctatctggacaacggcgtgtataaatttgtgactgtcaagaatctggatgtcatcaaaaaggagaactactatgaagtgaatagcaagtgctacgaagaggctaaaaagctgaaaaagattagcaaccaggcagagttcatcgcctccttttacaacaacgacctgattaagatcaatggcgaactgtatagggtcatcggggtgaacaatgatctgctgaaccgcattgaagtgaatatgattgacatcacttaccgagagtatctggaaaacatgaatgataagcgcccccctcgaattatcaaaacaattgcctctaagactcagagtatcaaaaagtactcaaccgacattctgggaaacctgtatgaggtgaagagcaaaaagcaccctcagattatcaaaaagggc

SEQ ID NO: 12 - protein, 1082 aa, Neisseria meningitidis
MAAFKPNPINYILGLDIGIASVGWAMVEIDEDENPICLIDLGVRVFERAEVPKTGDSLAMARRLARSVRRLTRRRAHRLLRARRLLKREGVLQAADFDENGLIKSLPNTPWQLRAAALDRKLTPLEWSAVLLHLIKHRGYLSQRKNEGETADKELGALLKGVADNAHALQTGDFRTPAELALNKFEKESGHIRNQRGDYSHTFSRKDLQAELILLFEKQKEFGNPHVSGGLKEGIETLLMTQRPALSGDAVQKMLGHCTFEPAEPKAAKNTYTAERFIWLTKLNNLRILEQGSERPLTDTERATLMDEPYRKSKLTYAQARKLLGLEDTAFFKGLRYGKDNAEASTLMEMKAYHAISRALEKEGLKDKKSPLNLSPELQDEIGTAFSLFKTDEDITGRLKDRIQPEILEALLKHISFDKFVQISLKALRRIVPLMEQGKRYDEACAEIYGDHYGKKNTEEKIYLPPIPADEIRNPVVLRALSQARKVINGVVRRYGSPARIHIETAREVGKSFKDRKEIEKRQEENRKDREKAAAKFREYFPNFVGEPKSKDILKLRLYEQQHGKCLYSGKEINLGRLNEKGYVEIDHALPFSRTWDDSFNNKVLVLGSENQNKGNQTPYEYFNGKDNSREWQEFKARVETSRFPRSKKQRILLQKFDEDGFKERNLNDTRYVNRFLCQFVADRMRLTGKGKKRVFASNGQITNLLRGFWGLRKVRAENDRHHALDAVVVACSTVAMQQKITRFVRYKEMNAFDGKTIDKETGEVLHQKTHFPQPWEFFAQEVMIRVFGKPDGKPEFEEADTPEKLRTLLAEKLSSRPEAVHEYVTPLFVSRAPNRKMSGQGHMETVKSAKRLDEGVSVLRVPLTQLKLKDLEKMVNREREPKLYEALKARLEAHKDDPAKAFAEPFYKYDKAGNRTQQVKAVRVEQVQKTGVWVRNHNGIADNATMVRVDVFEKGDKYYLVPIYSWQVAKGILPDRAVVQGKDEEDWQLIDDSFNFKFSLHPNDLVEVITKKARMFGYFASCHRGTGNINIRIHDLDHKIGKNGILEGIGVKTALSFQKYQIDELGKEIRPCRLKKRPPVR

SEQ ID NO: 13 - DNA, 3249 bp, Neisseria meningitidis
  misc_feature 1..3249: note = Exemplary codon optimized Cas9
  source 1..3249: mol_type = other DNA
atggccgccttcaagcccaaccccatcaactacatcctgggcctggacatcggcatcgccagcgtgggctgggccatggtggagatcgacgaggacgagaaccccatctgcctgatcgacctgggtgtgcgcgtgttcgagcgcgctgaggtgcccaagactggtgacagtctggctatggctcgccggcttgctcgctctgttcggcgccttactcgccggcgcgctcaccgccttctgcgcgctcgccgcctgctgaagcgcgagggtgtgctgcaggctgccgacttcgacgagaacggcctgatcaagagcctgcccaacactccttggcagctgcgcgctgccgctctggaccgcaagctgactcctctggagtggagcgccgtgctgctgcacctgatcaagcaccgcggctacctgagccagcgcaagaacgagggcgagaccgccgacaaggagctgggtgctctgctgaagggcgtggccgacaacgcccacgccctgcagactggtgacttccgcactcctgctgagctggccctgaacaagttcgagaaggagagcggccacatccgcaaccagcgcggcgactacagccacaccttcagccgcaaggacctgcaggccgagctgatcctgctgttcgagaagcagaaggagttcggcaacccccacgtgagcggcggcctgaaggagggcatcgagaccctgctgatgacccagcgccccgccctgagcggcgacgccgtgcagaagatgctgggccactgcaccttcgagccagccgagcccaaggccgccaagaacacctacaccgccgagcgcttcatctggctgaccaagctgaacaacctgcgcatcctggagcagggcagcgagcgccccctgaccgacaccgagcgcgccaccctgatggacgagccctaccgcaagagcaagctgacctacgcccaggcccgcaagctgctgggtctggaggacaccgccttcttcaagggcctgcgctacggcaaggacaacgccgaggccagcaccctgatggagatgaaggcctaccacgccatcagccgcgccctggagaaggagggcctgaaggacaagaagagtcctctgaacctgagccccgagctgcaggacgagatcggcaccgccttcagcctgttcaagaccgacgaggacatcaccggccgcctgaaggaccgcatccagcccgagatcctggaggccctgctgaagcacatcagcttcgacaagttcgtgcagatcagcctgaaggccctgcgccgcatcgtgcccctgatggagcagggcaagcgctacgacgaggcctgcgccgagatctacggcgaccactacggcaagaagaacaccgaggagaagatctacctgcctcctatccccgccgacgagatccgcaaccccgtggtgctgcgcgccctgagccaggcccgcaaggtgatcaacggcgtggtgcgccgctacggcagccccgcccgcatccacatcgagaccgcccgcgaggtgggcaagagcttcaaggaccgcaaggagatcgagaagcgccaggaggagaaccgcaaggaccgcgagaaggccgccgccaagttccgcgagtacttccccaacttcgtgggcgagcccaagagcaaggacatcctgaagctgcgcctgtacgagcagcagcacggcaagtgcctgtacagcggcaaggagatcaacctgggccgcctgaacgagaagggctacgtggagatcgaccacgccctgcccttcagccgcacctgggacgacagcttcaacaacaaggtgctggtgctgggcagcgagaaccagaacaagggcaaccagaccccctacgagtacttcaacggcaaggacaacagccgcgagtggcaggagttcaaggcccgcgtggagaccagccgcttcccccgcagcaagaagcagcgcatcctgctgcagaagttcgacgaggacggcttcaaggagcgcaacctgaacgacacccgctacgtgaaccgcttcctgtgccagttcgtggccgaccgcatgcgcctgaccggcaagggcaagaagcgcgtgttcgccagcaacggccagatcaccaacctgctgcgcggcttctggggcctgcgcaaggtgcgcgccgagaacgaccgccaccacgccctggacgccgtggtggtggcctgcagcaccgtggccatgcagcagaagatcacccgcttcgtgcgctacaaggagatgaacgccttcgacggtaaaaccatcgacaaggagaccggcgaggtgctgcaccagaagacccacttcccccagccctgggagttcttcgcccaggaggtgatgatccgcgtgttcggcaagcccgacggcaagcccgagttcgaggaggccgacacccccgagaagctgcgcaccctgctggccgagaagctgagcagccgccctgaggccgtgcacgagtacgtgactcctctgttcgtgagccgcgcccccaaccgcaagatgagcggtcagggtcacatggagaccgtgaagagcgccaagcgcctggacgagggcgtgagcgtgctgcgcgtgcccctgacccagctgaagctgaaggacctggagaagatggtgaaccgcgagcgcgagcccaagctgtacgaggccctgaaggcccgcctggaggcccacaaggacgaccccgccaaggccttcgccgagcccttctacaagtacgacaaggccggcaaccgcacccagcaggtgaaggccgtgcgcgtggagcaggtgcagaagaccggcgtgtgggtgcgcaaccacaacggcatcgccgacaacgccaccatggtgcgcgtggacgtgttcgagaagggcgacaagtactacctggtgcccatctacagctggcaggtggccaagggcatcctgcccgaccgcgccgtggtgcagggcaaggacgaggaggactggcagctgatcgacgacagcttcaacttcaagttcagcctgcaccccaacgacctggtggaggtgatcaccaagaaggcccgcatgttcggctacttcgccagctgccaccgcggcaccggcaacatcaacatccgcatccacgacctggaccacaagatcggcaagaacggcatcctggagggcatcggcgtgaagaccgccctgagcttccagaagtaccagatcgacgagctgggcaaggagatccgcccctgccgcctgaagaagcgccctcctgtgcgctaa

SEQ ID NO: 14 - protein, 859 aa, synthetic construct
  REGION 1..859: note = Synthetic Cas9 consensus sequence derived from Sm, Sp, St, and Li Cas9 sequences
  VAR_SEQ 4: note = Xaa can be any naturally occurring amino acid
  REGION 8..18: note = misc_feature - N-terminal RuvC-like domain
  VAR_SEQ 21: note = Xaa can be any naturally occurring amino acid
  VAR_SEQ 23: note = Xaa can be any naturally occurring amino acid
  VAR_SEQ 24: note = Xaa can be any naturally occurring amino acid
  VAR_SEQ 26: note = Xaa can be any naturally occurring amino acid
  VAR_SEQ 29..31: note = Each Xaa can independently be any naturally occurring amino acid
  VAR_SEQ 33: note = Xaa can be any naturally occurring amino acid
  VAR_SEQ 36: note = Xaa can be any naturally occurring amino acid
  VAR_SEQ 45: note = Xaa can be any naturally occurring amino acid
  VAR_SEQ 54: note = Xaa can be any naturally occurring amino acid
  VAR_SEQ 63: note = Xaa can be any naturally occurring amino acid
  VAR_SEQ 71: note = Xaa can be any naturally occurring amino acid
  VAR_SEQ 75: note = Xaa can be any naturally occurring amino acid
  VAR_SEQ 76: note = Xaa can be any naturally occurring amino acid
  VAR_SEQ 78..80: note = Each Xaa can independently be any naturally occurring amino acid
  VAR_SEQ 82: note = Xaa can be any naturally occurring amino acid
  VAR_SEQ 84: note = Xaa can be any naturally occurring amino acid
  VAR_SEQ 85: note = Xaa can be any naturally occurring amino acid
  VAR_SEQ 89: note = Xaa can be any naturally occurring amino acid
  VAR_SEQ 90: note = Xaa can be any naturally occurring amino acid
  VAR_SEQ 98: note = Xaa can be any naturally occurring amino acid
  VAR_SEQ 100: note = Xaa can be any naturally occurring amino acid
  VAR_SEQ 106: note = Xaa can be any naturally occurring amino acid
  VAR_SEQ 113: note = Xaa can be any naturally occurring amino acid
  VAR_SEQ 116: note = Xaa can be any naturally occurring amino acid
  VAR_SEQ 125: note = Xaa can be any naturally occurring amino acid
  VAR_SEQ 126: note = Xaa can be any naturally occurring amino acid
  VAR_SEQ 128..133: note = Each Xaa can independently be any naturally occurring amino acid
  VAR_SEQ 135: note = Xaa can be any naturally occurring amino acid
  VAR_SEQ 137: note = Xaa can be any naturally occurring amino acid
  VAR_SEQ 139..147: note = Each Xaa can independently be any naturally occurring amino acid
  VAR_SEQ 153..155: note = Each Xaa can independently be any naturally occurring amino acid
  VAR_SEQ 157: note = Xaa can be any naturally occurring amino acid
  VAR_SEQ 159: note = Xaa can be any naturally occurring amino acid
  VAR_SEQ 161: note = Xaa can be any naturally occurring amino acid
  VAR_SEQ 163: note = Xaa can be any naturally occurring amino acid
  VAR_SEQ 166..168: note = Each Xaa can independently be any naturally occurring amino acid
  VAR_SEQ 170: note = Xaa can be any naturally occurring amino acid
  VAR_SEQ 171: note = Xaa can be any naturally occurring amino acid
  VAR_SEQ 173..175: note = Each Xaa can independently be any naturally occurring amino acid
  VAR_SEQ 177: note = Xaa can be any naturally occurring amino acid
  VAR_SEQ 183: note = Xaa can be any naturally occurring amino acid
  VAR_SEQ 185..187: note = Each Xaa can independently be any naturally occurring amino acid
  VAR_SEQ 189: note = Each Xaa can independently be any naturally occurring amino acid
  VAR_SEQ 192..195: note = Each Xaa can independently be any naturally occurring amino acid
  VAR_SEQ 198: note = Xaa can be any naturally occurring amino acid
  VAR_SEQ 199: note = Xaa can be any naturally occurring amino acid
  VAR_SEQ 202: note = Xaa can be any naturally occurring amino acid
  VAR_SEQ 206: note = Each Xaa can independently be any naturally occurring amino acid
  VAR_SEQ 207: note = Xaa can be any naturally occurring amino acid
  VAR_SEQ 210: note = Xaa can be any naturally occurring amino acid
  VAR_SEQ 212: note = Xaa can be any naturally occurring amino acid
  VAR_SEQ 213: note = Xaa can be any naturally occurring amino acid
  VAR_SEQ 219: note = Xaa can be any naturally occurring amino acid
  VAR_SEQ 220: note = Xaa can be any naturally occurring amino acid
  VAR_SEQ 222: note = Xaa can be any naturally occurring amino acid
  VAR_SEQ 224: note = Xaa can be any naturally occurring amino acid
  VAR_SEQ 226: note = Xaa can be any naturally occurring amino acid
  VAR_SEQ 236: note = Xaa can be any naturally occurring amino acid
  VAR_SEQ 240: note = Xaa can be any naturally occurring amino acid
  VAR_SEQ 241: note = Xaa can be any naturally occurring amino acid
  VAR_SEQ 244..246: note = Each Xaa can independently be any naturally occurring amino acid
  VAR_SEQ 248: note = Xaa can be any naturally occurring amino acid
  VAR_SEQ 249: note = Xaa can be any naturally occurring amino acid
  VAR_SEQ 250: note = Xaa can be any naturally occurring amino acid
  VAR_SEQ 252..254: note = Each Xaa can independently be any naturally occurring amino acid
  VAR_SEQ 256: note = Xaa can be any naturally occurring amino acid
  VAR_SEQ 257: note = Xaa can be any naturally occurring amino acid
  VAR_SEQ 268: note = Xaa can be any naturally occurring amino acid
  VAR_SEQ 271: note = Xaa can be any naturally occurring amino acid
  VAR_SEQ 273: note = Xaa can be any naturally occurring amino acid
  VAR_SEQ 277: note = Xaa can be any naturally occurring amino acid
  VAR_SEQ 280: note = Xaa can be any naturally occurring amino acid
  VAR_SEQ 281: note = Xaa can be any naturally occurring amino acid
  VAR_SEQ 283: note = Xaa can be any naturally occurring amino acid
  VAR_SEQ 289: note = Xaa can be any naturally occurring amino acid
  VAR_SEQ 290: note = Xaa can be any naturally occurring amino acid
  VAR_SEQ 292..294: note = Each Xaa can independently be any naturally occurring amino acid
  VAR_SEQ 301: note = Xaa can be any naturally occurring amino acid
  VAR_SEQ 308: note = Xaa can be any naturally occurring amino acid
  VAR_SEQ 319..322: note = Each Xaa can independently be any naturally occurring amino acid
  VAR_SEQ 328: note = Xaa can be any naturally occurring amino acid
  VAR_SEQ 329: note = Xaa can be any naturally occurring amino acid
  VAR_SEQ 335..337: note = Each Xaa can independently be any naturally occurring amino acid
  VAR_SEQ 346: note = Xaa can be any naturally occurring amino acid
  VAR_SEQ 347: note = Xaa can be any naturally occurring amino acid
  VAR_SEQ 356..361: note = Each Xaa can independently be any naturally occurring amino acid
  VAR_SEQ 363: note = Xaa can be any naturally occurring amino acid
  VAR_SEQ 370..373: note = Each Xaa can independently be any naturally occurring amino acid
  VAR_SEQ 375: note = Xaa can be any naturally occurring amino acid
  VAR_SEQ 376: note = Xaa can be any naturally occurring amino acid
  VAR_SEQ 379: note = Xaa can be any naturally occurring amino acid
  VAR_SEQ 386..390: note = Each Xaa can independently be any naturally occurring amino acid
  VAR_SEQ 393: note = Xaa can be any naturally occurring amino acid
  VAR_SEQ 395: note = Xaa can be any naturally occurring amino acid
  VAR_SEQ 396: note = Xaa can be any naturally occurring amino acid
  VAR_SEQ 398: note = Xaa can be any naturally occurring amino acid
  VAR_SEQ 400: note = Xaa can be any naturally occurring amino acid
  VAR_SEQ 403: note = Xaa can be any naturally occurring amino acid
  VAR_SEQ 407: note = Xaa can be any naturally occurring amino acid
  VAR_SEQ 410: note = Xaa can be any naturally occurring amino acid
  VAR_SEQ 411: note = Xaa can be any naturally occurring amino acid
  VAR_SEQ 413..416: note = Each Xaa can independently be any naturally occurring amino acid
  VAR_SEQ 418: note = Xaa can be any naturally occurring amino acid
  VAR_SEQ 422: note = Xaa can be any naturally occurring amino acid
  VAR_SEQ 428: note = Xaa can be any naturally occurring amino acid
  VAR_SEQ 431: note = Xaa can be any naturally occurring amino acid
  VAR_SEQ 433: note = Xaa can be any naturally occurring amino acid
  VAR_SEQ 437..439: note = Each Xaa can independently be any naturally occurring amino acid
  VAR_SEQ 445: note = Xaa can be any naturally occurring amino acid
  VAR_SEQ 451: note = Xaa can be any naturally occurring amino acid
  VAR_SEQ 456: note = Xaa can be any naturally occurring amino acid
  VAR_SEQ 459: note = Xaa can be any naturally occurring amino acid
  VAR_SEQ 465..469: note = Each Xaa can independently be any naturally occurring amino acid
  VAR_SEQ 481: note = Xaa can be any naturally occurring amino acid
  VAR_SEQ 482: note = Xaa can be any naturally occurring amino acid
  VAR_SEQ 484: note = Xaa can be any naturally occurring amino acid
  VAR_SEQ 490: note = Xaa can be any naturally occurring amino acid
  VAR_SEQ 494: note = Xaa can be any naturally occurring amino acid
  REGION 495..502: note = misc_feature - RuvC-like domain
  VAR_SEQ 497: note = Xaa can be any naturally occurring amino acid
  VAR_SEQ 506: note = Xaa can be any naturally occurring amino acid
  VAR_SEQ 510: note = Xaa can be any naturally occurring amino acid
  VAR_SEQ 513: note = Xaa can be any naturally occurring amino acid
  VAR_SEQ 514: note = Xaa can be any naturally occurring amino acid
  VAR_SEQ 517: note = Xaa can be any naturally occurring amino acid
  VAR_SEQ 520: note = Xaa can be any naturally occurring amino acid
  VAR_SEQ 525: note = Xaa can be any naturally occurring amino acid
  VAR_SEQ 526: note = Xaa can be any naturally occurring amino acid
  VAR_SEQ 529: note = Xaa can be any naturally occurring amino acid
  VAR_SEQ 531: note = Xaa can be any naturally occurring amino acid
  VAR_SEQ 532: note = Xaa can be any naturally occurring amino acid
  VAR_SEQ 534: note = Each Xaa can independently be any naturally occurring amino acid
  VAR_SEQ 542: note = Each Xaa can independently be any naturally occurring amino acid
  VAR_SEQ 546: note = Xaa can be any naturally occurring amino acid
  VAR_SEQ 547: note = Xaa can be any naturally occurring amino acid
  VAR_SEQ 553: note = Xaa can be any naturally occurring amino acid
  REGION 555..575: note = misc_feature - HNH-like domain
  VAR_SEQ 556: note = Xaa can be any naturally occurring amino acid
  VAR_SEQ 560: note = Xaa can be any naturally occurring amino acid
  VAR_SEQ 563: note = Xaa can be any naturally occurring amino acid
  VAR_SEQ 565: note = Xaa can be any naturally occurring amino acid
  VAR_SEQ 567: note = Xaa can be any naturally occurring amino acid
  VAR_SEQ 579: note = Xaa can be any naturally occurring amino acid
  VAR_SEQ 582: note = Xaa can be any naturally occurring amino acid
  VAR_SEQ 583: note = Xaa can be any naturally occurring amino acid
  VAR_SEQ 585: note = Xaa can be any naturally occurring amino acid
  VAR_SEQ 588: note = Xaa can be any naturally occurring amino acid
  VAR_SEQ 590: note = Xaa can be any naturally occurring amino acid
  VAR_SEQ 592: note = Xaa can be any naturally occurring amino acid
  VAR_SEQ 594..596: note = Each Xaa can independently be any naturally occurring amino acid
  VAR_SEQ 610: note = Xaa can be any naturally occurring amino acid
  VAR_SEQ 616: note = Xaa can be any naturally occurring amino acid
  VAR_SEQ 628: note = Xaa can be any naturally occurring amino acid
  VAR_SEQ 631: note = Xaa can be any naturally occurring amino acid
  VAR_SEQ 633: note = Xaa can be any naturally occurring amino acid
  VAR_SEQ 634: note = Xaa can be any naturally occurring amino acid
  VAR_SEQ 636: note = Xaa can be any naturally occurring amino acid
  VAR_SEQ 638..641: note = Each Xaa can independently be any naturally occurring amino acid
  VAR_SEQ 643..645: note = Each Xaa can independently be any naturally occurring amino acid
  VAR_SEQ 653: note = Xaa can be any naturally occurring amino acid
  VAR_SEQ 657: note = Xaa can be any naturally occurring amino acid
  VAR_SEQ 659: note = Xaa can be any naturally occurring amino acid
  VAR_SEQ 660: note = Each Xaa can independently be any naturally occurring amino acid
  VAR_SEQ 665: note = Xaa can be any naturally occurring amino acid
  VAR_SEQ 666: note = Xaa can be any naturally occurring amino acid
  VAR_SEQ 668: note = Xaa can be any naturally occurring amino acid
  VAR_SEQ 669: note = Xaa can be any naturally occurring amino acid
  REGION 670..677: note = misc_feature - RuvC-like domain
  VAR_SEQ 680: note = Xaa can be any naturally occurring amino acid
  VAR_SEQ 681: note = Xaa can be any naturally occurring amino acid
  VAR_SEQ 683: note = Xaa can be any naturally occurring amino acid
  VAR_SEQ 686: note = Xaa can be any naturally occurring amino acid
  VAR_SEQ 696: note = Xaa can be any naturally occurring amino acid
  VAR_SEQ 697: note = Xaa can be any naturally occurring amino acid
  VAR_SEQ 704: note = Xaa can be any naturally occurring amino acid
  VAR_SEQ 708: note = Xaa can be any naturally occurring amino acid
  VAR_SEQ 710: note = Xaa can be any naturally occurring amino acid
  VAR_SEQ 711: note = Xaa can be any naturally occurring amino acid
  VAR_SEQ 714: note = Xaa can be any naturally occurring amino acid
  VAR_SEQ 717..720: note = Each Xaa can independently be any naturally occurring amino acid
  VAR_SEQ 722: note = Xaa can be any naturally occurring amino acid
  VAR_SEQ 725: note = Xaa can be any naturally occurring amino acid
  VAR_SEQ 727: note = Xaa can be any naturally occurring amino acid
  VAR_SEQ 733..735: note = Each Xaa can independently be any naturally occurring amino acid
  VAR_SEQ 740: note = Xaa can be any naturally occurring amino acid
  VAR_SEQ 742: note = Xaa can be any naturally occurring amino acid
  VAR_SEQ 749..754: note = Each Xaa can independently be any naturally occurring amino acid
  VAR_SEQ 758..761: note = Each Xaa can independently be any naturally occurring amino acid
  VAR_SEQ 763..768: note = Each Xaa can independently be any naturally occurring amino acid
  VAR_SEQ 771: note = Xaa can be any naturally occurring amino acid
  VAR_SEQ 774..777: note = Each Xaa can independently be any naturally occurring amino acid
  VAR_SEQ 782: note = Xaa can be any naturally occurring amino acid
  VAR_SEQ 784..786: note = Each Xaa can independently be any naturally occurring amino acid
  VAR_SEQ 788: note = Xaa can be any naturally occurring amino acid
  VAR_SEQ 790: note = Xaa can be any naturally occurring amino acid
  VAR_SEQ 795: note = Xaa can be any naturally occurring amino acid
  VAR_SEQ 799: note = Xaa can be any naturally occurring amino acid
  VAR_SEQ 801: note = Xaa can be any naturally occurring amino acid
  VAR_SEQ 802: note = Xaa can be any naturally occurring amino acid
  VAR_SEQ 804: note = Xaa can be any naturally occurring amino acid
  VAR_SEQ 806..813: note = Each Xaa can independently be any naturally occurring amino acid
  VAR_SEQ 815..818: note = Each Xaa can independently be any naturally occurring amino acid
  VAR_SEQ 820: note = Xaa can be any naturally occurring amino acid
  VAR_SEQ 823..827: note = Each Xaa can independently be any naturally occurring amino acid
  VAR_SEQ 829: note = Xaa can be any naturally occurring amino acid
  VAR_SEQ 830: note = Xaa can be any naturally occurring amino acid
  VAR_SEQ 832: note = Xaa can be any naturally occurring amino acid
  VAR_SEQ 835..837: note = Each Xaa can independently be any naturally occurring amino acid
  VAR_SEQ 842..844: note = Each Xaa can independently be any naturally occurring amino acid
  VAR_SEQ 846: note = Xaa can be any naturally occurring amino acid
  VAR_SEQ 848: note = Xaa can be any naturally occurring amino acid
  VAR_SEQ 851: note = Xaa can be any naturally occurring amino acid
  VAR_SEQ 857: note = Xaa can be any naturally occurring amino acid
  VAR_SEQ 857: note = Xaa can be any naturally occurring amino acid
MKYXIGLDIGTNSVGWAVTDXYXXKXKGXXXIXKNXGLFDGTARXRTARRRRRXNRIYLQIFXEMDFFRLXSFVXXKXXXPXFXXEYHXXPTIYHLRXLXKDLRLXYLALAHXIKXRGNFLIEGXXNXXXXXXYXFXIXXXXXXXXXPEKGFXXXLXGXFXFXLEXXXKXXYXXXLXLLIGDXYXXXFXAKXXXXLSXXVTXALSXXMIXRXXHDLLKXXYXEXFXKGYAGYIDGXQFYXXKLXXXGXXXKXXXEXXLRKQRTFDNGXIPXQXHLEXAIXXQXYPFLNXXIXXXTFRIPYXVGPLAGXSFAWRKIPWNXXXXDSAFIXXMTDLPXXXVLPKHSLYXXVYNELTKVXXXXXXKXIFKRKVXXXXGXXFNXSTYHDLXXXXXLDXNXXEXIXLTXFEDXMIXXLXXXXKXLRRXYTGWGXLSXLXGIRXXXSTILDXLDNRNXMQLIXDLXFKIKQXXXXXGSPAIKKGILQXXKXVDELVXMGPXIVXEMARENQTXGNSXRKXXKEXGSXILKEXXNLXNXXLXLYYLQNGXDMYXXLDILSXYDXDHIXPQXFXDXSIDNVLSNRKDXVPXXVXKKXWXLXLXXXRKFDLTKAERGGLXDKAFIXRQLVETRQITKXVAXLXXNXDXXXXVXXXTLKSLVSXFRKXFXXLYKVXXNXXHHAHDAYLNVXXLXYPXLEEFVYGDYXXKATKFYXNIMXFXXGEXWKXXXXVXMQXNXVKKEQXXXPKNSXLXKDKYGGXXXXXXKGKXXXXIXXXXXXFLXGYXXXXLPKYXLXXXGXRXLASEXKGNXLXXLXAXXXXXXXXEXXXXFXANXXXXXLXXGXAFXXXIRRYXXXTXIXQSXTGLYEXRL

SEQ ID NO: 15 - protein, 8 aa, synthetic construct
  REGION 1..8: note = RuvC-like domain
  VARIANT 2: note = Xaa is Val or His
  VARIANT 3: note = Xaa is Ile, Leu, or Val
  VARIANT 5: note = Xaa is Met or Thr
IXXEXARE

SEQ ID NO: 16 - protein, 8 aa, synthetic construct
  REGION 1..8: note = RuvC-like domain
  VARIANT 3: note = Xaa is Ile, Leu, or Val
IVXEMARE

SEQ ID NO: 17 - protein, 8 aa, synthetic construct
  REGION 1..8: note = RuvC-like domain
  VARIANT 4: note = Xaa is His or Leu
  VARIANT 7: note = Xaa is Arg or Val
  VARIANT 8: note = Xaa is Glu or Val
HHAXDAXX

SEQ ID NO: 18 - protein, 8 aa, synthetic construct
  REGION 1..8: note = RuvC-like domain
HHAHDAYL

SEQ ID NO: 19 - protein, 30 aa, synthetic construct
  VARIANT 2: note = Xaa is Lys or Pro
  VARIANT 4: note = Xaa is Val, Leu, Ile, or Phe
  VARIANT 5: note = Xaa is Gly, Ala, or Ser
  VARIANT 6: note = Xaa is Leu, Ile, Val, or Phe
  MOD_RES 7..26: note = N-terminal RuvC-like domain, each Xaa can be any amino acid or absent, region may encompass 5-20 residues
  VARIANT 29: note = Xaa is Asp, Glu, Asn, or Gln
  VAR_SEQ 1..30: note = N-terminal RuvC-like domain
KXYXXXXXXXXXXXXXXXXXXXXXXXTDXY

SEQ ID NO: 20 - skipped

SEQ ID NO: 21 - protein, 12 aa, synthetic construct
  REGION 1..12: note = N-terminal RuvC-like domain
  VARIANT 2: note = Xaa is Ile, Val, Met, Leu, or Thr
  VARIANT 4: note = Xaa is Thr, Ile, Val, Ser, Asn, Tyr, Glu, or Leu
  VARIANT 5: note = Xaa is Asn, Ser, Gly, Ala, Asp, Thr, Arg, Met, or Phe
  VARIANT 7: note = Xaa is Val, Ile, Leu, Cys, Thr, or Phe
  VARIANT 9: note = Xaa is Trp, Phe, Val, Tyr, Ser, or Leu
  VARIANT 10: note = Xaa is Ala, Ser, Cys, Val, or Gly
  VARIANT 11: note = Xaa is Val, Ile, Leu, Ala, Met, or His
  VARIANT 12: note = Any amino acid or absent
DXGXXSXGXXXX

SEQ ID NO: 22 - protein, 12 aa, synthetic construct
  REGION 1..12: note = N-terminal RuvC-like domain
  VARIANT 4: note = Xaa is Thr, Ile, Val, Ser, Asn, Tyr, Glu, or Leu
  VARIANT 5: note = Xaa is Asn, Ser, Gly, Ala, Asp, Thr, Arg, Met, or Phe
  VARIANT 11: note = Xaa is Val, Ile, Leu, Ala, Met, or His
  VARIANT 12: note = Any amino acid or absent
DIGXXSVGWAXX

SEQ ID NO: 23 - protein, 12 aa, synthetic construct
  MOD_RES 12: note = Any non-polar alkyl amino acid or a hydroxyl amino acid
  VAR_SEQ 1..12: note = N-terminal RuvC-like domain
DIGTNSVGWAVX

SEQ ID NO: 24 - protein, 73 aa, synthetic construct
  VARIANT 8: note = Xaa is Lys or Arg
  VARIANT 12: note = Xaa is Val or Thr
  VARIANT 13: note = Xaa is Gly or Asp
  VARIANT 14: note = Xaa is Glu, Gln, or Asp
  VARIANT 15: note = Xaa is Glu or Asp
  VARIANT 19: note = Xaa is Asp, Asn, or His
  VARIANT 20: note = Xaa is Tyr, Arg, or Asn
  VARIANT 23: note = Xaa is Gln, Asp, or Asn
  MOD_RES 25..64: note = HNH-like domain, each Xaa can be any amino acid or absent, region may encompass 15-40 residues
  VARIANT 67: note = Xaa is Gly or Glu
  VARIANT 69: note = Xaa is Ser or Gly
  VARIANT 71: note = Xaa is Asp or Asn
  VAR_SEQ 1..73: note = HNH-like domain
LYYLQNGXDMYXXXXLDIXXLSXYXXXXXXXXXXXXXXXXXXXXXXXXXXXXXXXXXXXXXXXXNRXKXDXVP

SEQ ID NO: 25 - protein, 27 aa, synthetic construct
  REGION 1..27: note = HNH-like domain
  VARIANT 1: note = Xaa is Asp, Glu, Gln, or Asn
  VARIANT 2: note = Xaa is Leu, Ile, Arg, Gln, Val, Met, or Lys
  VARIANT 3: note = Xaa is Asp or Glu
  VARIANT 5: note = Xaa is Ile, Val, Thr, Ala, or Leu
  VARIANT 6: note = Xaa is Val, Tyr, Ile, Leu, Phe, or Trp
  VARIANT 8: note = Xaa is Gln, His, Arg, Lys, Tyr, Ile, Leu, Phe, or Trp
  VARIANT 9: note = Xaa is Ser, Ala, Asp, Thr, or Lys
  VARIANT 10: note = Xaa is Phe, Leu, Val, Lys, Tyr, Met, Ile, Arg, Ala, Glu, Asp, or Gln
  VARIANT 11: note = Xaa is Leu, Arg, Thr, Ile, Val, Ser, Cys, Tyr, Lys, Phe, or Gly
  VARIANT 12: note = Xaa is Lys, Gln, Tyr, Thr, Phe, Leu, Trp, Met, Ala, Glu, Gly, or Ser
  VARIANT 13: note = Xaa is Asp, Ser, Asn, Arg, Leu, or Thr
  VARIANT 14: note = Xaa is Asp, Asn, or Ser
  VARIANT 15: note = Xaa is Ser, Ala, Thr, Gly, or Arg
  VARIANT 16: note = Xaa is Ile, Leu, Phe, Ser, Arg, Tyr, Gln, Trp, Asp, Lys, or His
  VARIANT 17: note = Xaa is Asp, Ser, Ile, Asn, Glu, Ala, His, Phe, Leu, Gln, Met, Gly, Tyr, or Val
  VARIANT 19: note = Xaa is Lys, Leu, Arg, Met, Thr, or Phe
  VARIANT 20: note = Xaa is Val, Leu, Ile, Ala, or Thr
  VARIANT 21: note = Xaa is Leu, Ile, Val, or Ala
  VARIANT 22: note = Xaa is Thr, Val, Cys, Glu, Ser, or Ala
  VARIANT 23: note = Xaa is Arg, Phe, Thr, Trp, Glu, Leu, Asn, Cys, Lys, Val, Ser, Gln, Ile, Tyr, His, or Ala
  VARIANT 24: note = Xaa is Ser, Pro, Arg, Lys, Asn, Ala, His, Gln, Gly, or Leu
  VARIANT 25: note = Xaa is Asp, Gly, Thr, Asn, Ser, Lys, Ala, Ile, Glu, Leu, Gln, Arg, or Tyr
  VARIANT 26: note = Xaa is Lys, Val, Ala, Glu, Tyr, Ile, Cys, Leu, Ser, Thr, Gly, Lys, Met, Asp, or Phe
XXXHXXPXXXXXXXXXXNXXXXXXXXN

SEQ ID NO: 26 - protein, 27 aa, synthetic construct
  REGION 1..27: note = HNH-like domain
  VARIANT 1: note = Xaa is Asp or Glu
  VARIANT 2: note = Xaa is Leu, Ile, Arg, Gln, Val, Met, or Lys
  VARIANT 3: note = Xaa is Asp or Glu
  VARIANT 5: note = Xaa is Ile, Val, Thr, Ala, or Leu
  VARIANT 6: note = Xaa is Val, Tyr, Ile, Leu, Phe, or Trp
  VARIANT 8: note = Xaa is Gln, His, Arg, Lys, Tyr, Ile, Leu, Phe, or Trp
  VARIANT 10: note = Xaa is Phe, Leu, Val, Lys, Tyr, Met, Ile, Arg, Ala, Glu, Asp, or Gln
  VARIANT 11: note = Xaa is Leu, Arg, Thr, Ile, Val, Ser, Cys, Tyr, Lys, Phe, or Gly
  VARIANT 12: note = Xaa is Lys, Gln, Tyr, Thr, Phe, Leu, Trp, Met, Ala, Glu, Gly, or Ser
  VARIANT 16: note = Xaa is Ile, Leu, Phe, Ser, Arg, Tyr, Gln, Trp, Asp, Lys, or His
  VARIANT 17: note = Xaa is Asp, Ser, Ile, Asn, Glu, Ala, His, Phe, Leu, Gln, Met, Gly, Tyr, or Val
  VARIANT 22: note = Xaa is Thr, Val, Cys, Glu, Ser, or Ala
  VARIANT 23: note = Xaa is Arg, Phe, Thr, Trp, Glu, Leu, Asn, Cys, Lys, Val, Ser, Gln, Ile, Tyr, His, or Ala
  VARIANT 24: note = Xaa is Ser, Pro, Arg, Lys, Asn, Ala, His, Gln, Gly, or Leu
  VARIANT 25: note = Xaa is Asp, Gly, Thr, Asn, Ser, Lys, Ala, Ile, Glu, Leu, Gln, Arg, or Tyr
  VARIANT 26: note = Xaa is Lys, Val, Ala, Glu, Tyr, Ile, Cys, Leu, Ser, Thr, Gly, Lys, Met, Asp, or Phe
XXXHXXPXSXXXDDSXXNKVLXXXXXN

SEQ ID NO: 27 - protein, 27 aa, synthetic construct
  REGION 1..27: note = HNH-like domain
  VARIANT 1: note = Xaa is Asp or Glu
  VARIANT 3: note = Xaa is Asp or Glu
  VARIANT 8: note = Xaa is Gln, His, Arg, Lys, Tyr, Ile, Leu, or Trp
  VARIANT 10: note = Xaa is Phe, Leu, Val, Lys, Tyr, Met, Ile, Arg, Ala, Glu, Asp, or Gln
  VARIANT 11: note = Xaa is Leu, Arg, Thr, Ile, Val, Ser, Cys, Tyr, Lys, Phe, or Gly
  VARIANT 12: note = Xaa is Lys, Gln, Tyr, Thr, Phe, Leu, Trp, Met, Ala, Glu, Gly, or Ser
  VARIANT 16: note = Xaa is Ile, Leu, Phe, Ser, Arg, Tyr, Gln, Trp, Asp, Lys, or His
  VARIANT 17: note = Xaa is Asp, Ser, Ile, Asn, Glu, Ala, His, Phe, Leu, Gln, Met, Gly, Tyr, or Val
  VARIANT 23: note = Xaa is Arg, Phe, Thr, Trp, Glu, Leu, Asn, Cys, Lys, Val, Ser, Gln, Ile, Tyr, His, or Ala
  VARIANT 24: note = Xaa is Ser, Pro, Arg, Lys, Asn, Ala, His, Gln, Gly, or Leu
  VARIANT 25: note = Xaa is Asp, Gly, Thr, Asn, Ser, Lys, Ala, Ile, Glu, Leu, Gln, Arg, or Tyr
  VARIANT 26: note = Xaa is Lys, Val, Ala, Glu, Tyr, Ile, Cys, Leu, Ser, Thr, Gly, Lys, Met, Asp, or Phe
XVXHIVPXSXXXDDSXXNKVLTXXXXN

SEQ ID NO: 28 - protein, 27 aa, synthetic construct
  REGION 1..27: note = HNH-like domain
  VARIANT 2: note = Xaa is Ile or Val
  VARIANT 6: note = Xaa is Ile or Val
  VARIANT 9: note = Xaa is Ala or Ser
  VARIANT 11: note = Xaa is Ile or Leu
  VARIANT 12: note = Xaa is Lys or Thr
  VARIANT 14: note = Xaa is Asp or Asn
  VARIANT 19: note = Xaa is Arg, Lys, or Leu
  VARIANT 22: note = Xaa is Thr or Val
  VARIANT 23: note = Xaa is Ser or Arg
  VARIANT 25: note = Xaa is Lys, Asp, or Ala
  VARIANT 26: note = Xaa is Glu, Lys, Gly, or Asn
DXDHIXPQXFXXDXSIDNXVLXXSXXN

SEQ ID NO: 29 - RNA, 116 nt, synthetic construct
  misc_feature 1..116: note = gRNA
  misc_difference 1..20: note = a, c, u, g, unknown or other
  misc_feature 1..20: note = targeting region
  misc_feature 21..42: note = first complementarity domain
  misc_feature 43..46: note = linking domain
  misc_feature 47..70: note = second complementarity domain
  source 1..116: mol_type = other RNA
nnnnnnnnnnnnnnnnnnnngttttagagctatgctgttttggaaacaaaacagcatagcaagttaaaataaggctagtccgttatcaacttgaaaaagtggcaccgagtcggtgc

SEQ ID NO: 30 - RNA, 116 nt, synthetic construct
  misc_feature 1..116: note = gRNA
  misc_difference 1..20: note = a, c, u, g, unknown or other
  misc_feature 1..20: note = targeting region
  misc_feature 21..42: note = first complementarity domain
  misc_feature 43..46: note = linking domain
  misc_feature 47..70: note = second complementarity domain
  source 1..116: mol_type = other RNA
nnnnnnnnnnnnnnnnnnnngtattagagctatgctgtattggaaacaatacagcatagcaagttaatataaggctagtccgttatcaacttgaaaaagtggcaccgagtcggtgc

SEQ ID NO: 31 - RNA, 96 nt, synthetic construct
  misc_feature 1..96: note = gRNA
  misc_difference 1..20: note = a, c, u, g, unknown or other
  misc_feature 1..20: note = targeting domain
  misc_feature 21..32: note = first complementarity domain
  misc_feature 33..36: note = linking domain
  misc_feature 37..50: note = second complementarity domain
  misc_feature 51..62: note = proximal domain
  source 1..96: mol_type = other RNA
nnnnnnnnnnnnnnnnnnnngtttaagagctagaaatagcaagtttaaataaggctagtccgttatcaacttgaaaaagtggcaccgagtcggtgc

SEQ ID NO: 32 - RNA, 47 nt, synthetic construct
  misc_feature 1..47: note = gRNA proximal and tail domains derived from S. pyogenes
  source 1..47: mol_type = other RNA
aaggctagtccgttatcaacttgaaaaagtggcaccgagtcggtgct

SEQ ID NO: 33 - RNA, 49 nt, synthetic construct
  misc_feature 1..49: note = gRNA proximal and tail domains
  source 1..49: mol_type = other RNA
aaggctagtccgttatcaacttgaaaaagtggcaccgagtcggtggtgc

SEQ ID NO: 34 - RNA, 51 nt, synthetic construct
  misc_feature 1..51: note = gRNA proximal and tail domains
  source 1..51: mol_type = other RNA
aaggctagtccgttatcaacttgaaaaagtggcaccgagtcggtgcggatc

SEQ ID NO: 35 - RNA, 31 nt, synthetic construct
  misc_feature 1..31: note = gRNA proximal and tail domains
  source 1..31: mol_type = other RNA
aaggctagtccgttatcaacttgaaaaagtg

SEQ ID NO: 36 - RNA, 18 nt, synthetic construct
  misc_feature 1..18: note = gRNA proximal and tail domains
  source 1..18: mol_type = other RNA
aaggctagtccgttatca

SEQ ID NO: 37 - RNA, 12 nt, synthetic construct
  misc_feature 1..12: note = gRNA proximal and tail domains
  source 1..12: mol_type = other RNA
aaggctagtccg

SEQ ID NO: 38 - RNA, 102 nt, synthetic construct
  misc_feature 1..102: note = Unimolecular gRNA derived from S. aureus
  misc_difference 1..20: note = n is a, c, g, or u
  misc_feature 1..20: note = Targeting domain
  source 1..102: mol_type = other RNA
nnnnnnnnnnnnnnnnnnnngttttagtactctggaaacagaatctactaaaacaaggcaaaatgccgtgtttatctcgtcaacttgttggcgagatttttt

SEQ ID NO: 39 - RNA, 42 nt, synthetic construct
  misc_feature 1..42: note = Modular gRNA derived from S. pyogenes
  misc_difference 1..20: note = a, c, u, g, unknown or other
  misc_feature 1..20: note = Targeting domain
  misc_feature 21..42: note = First complementarity domain
  source 1..42: mol_type = other RNA
nnnnnnnnnnnnnnnnnnnngttttagagctatgctgttttg

SEQ ID NO: 40 - RNA, 85 nt, synthetic construct
  misc_feature 1..85: note = Modular gRNA derived from S. pyogenes
  misc_feature 1..9: note = 5' extension domain
  misc_feature 10..33: note = Second complementarity domain
  misc_feature 34..45: note = Proximal domain
  misc_feature 46..85: note = Tail domain
  source 1..85: mol_type = other RNA
ggaaccattcaaaacagcatagcaagttaaaataaggctagtccgttatcaacttgaaaaagtggcaccgagtcggtgctttttt

SEQ ID NO: 41 - RNA, 62 nt, synthetic construct
  misc_feature 1..62: note = Unimolecular gRNA derived from S. pyogenes
  misc_difference 1..20: note = a, c, u, g, unknown or other
  misc_feature 1..20: note = Targeting domain
  misc_feature 21..32: note = First complementarity domain
  misc_feature 33..36: note = Linking domain
  misc_feature 37..50: note = Second complementarity domain
  misc_feature 51..62: note = Proximal domain
  source 1..62: mol_type = other RNA
nnnnnnnnnnnnnnnnnnnngttttagagctagaaatagcaagttaaaataaggctagtccg

SEQ ID NO: 42 - RNA, 102 nt, synthetic construct
  misc_feature 1..102: note = Unimolecular gRNA derived from S. pyogenes
  misc_difference 1..20: note = a, c, u, g, unknown or other
  misc_feature 1..20: note = Targeting domain
  misc_feature 21..32: note = First complementarity domain
  misc_feature 33..36: note = Linking domain
  misc_feature 37..50: note = Second complementarity domain
  misc_feature 51..62: note = Proximal domain
  misc_feature 63..102: note = Tail domain
  source 1..102: mol_type = other RNA
nnnnnnnnnnnnnnnnnnnngttttagagctagaaatagcaagttaaaataaggctagtccgttatcaacttgaaaaagtggcaccgagtcggtgctttttt

SEQ ID NO: 43 - RNA, 75 nt, synthetic construct
  misc_feature 1..75: note = Unimolecular gRNA derived from S. pyogenes
  misc_feature 1..20: note = Targeting domain
  misc_difference 1..20: note = a, c, u, g, unknown or other
  misc_feature 21..36: note = First complementarity domain
  misc_feature 37..40: note = Linking domain
  misc_feature 41..58: note = Second complementarity domain
  misc_feature 59..70: note = Proximal domain
  misc_feature 71..75: note = Tail domain
  source 1..75: mol_type = other RNA
nnnnnnnnnnnnnnnnnnnngttttagagctatgctgaaaagcatagcaagttaaaataaggctagtccgttatc

SEQ ID NO: 44 - RNA, 87 nt, synthetic construct
  misc_feature 1..87: note = Unimolecular gRNA derived from S. pyogenes
  misc_difference 1..20: note = a, c, u, g, unknown or other
  misc_feature 1..20: note = Targeting domain
  misc_feature 21..32: note = First complementarity domain
  misc_feature 43..46: note = Linking domain
  misc_feature 57..70: note = Second complementarity domain
  misc_feature 71..82: note = Proximal domain
  misc_feature 83..87: note = Tail domain
  source 1..87: mol_type = other RNA
nnnnnnnnnnnnnnnnnnnngttttagagctatgctgttttggaaacaaaacagcatagcaagttaaaataaggctagtccgttatc

SEQ ID NO: 45 - RNA, 42 nt, synthetic construct
  misc_feature 1..42: note = Modular gRNA derived from S. thermophilus
  misc_difference 1..20: note = a, c, u, g, unknown or other
  misc_feature 1..20: note = Targeting domain
  misc_feature 21..42: note = First complementarity domain
  source 1..42: mol_type = other RNA
nnnnnnnnnnnnnnnnnnnngttttagagctgtgttgtttcg

SEQ ID NO: 46 - RNA, 78 nt, synthetic construct
  misc_feature 1..78: note = Modular gRNA derived from S. thermophilus
  misc_feature 1..3: note = 5' extension domain
  misc_feature 4..27: note = Second complementarity domain
  misc_feature 28..40: note = Proximal domain
  misc_feature 41..78: note = Tail domain
  source 1..78: mol_type = other RNA
gggcgaaacaacacagcgagttaaaataaggcttagtccgtactcaacttgaaaaggtggcaccgattcggtgttttt

SEQ ID NO: 47 - RNA, 85 nt, synthetic construct
  misc_feature 1..85: note = Modular gRNA derived from S. pyogenes
  source 1..85: mol_type = other RNA
gaaccattcaaaacagcatagcaagttaaaataaggctagtccgttatcaacttgaaaaagtggcaccgagtcggtgcttttttt

SEQ ID NO: 48 - RNA, 96 nt, synthetic construct
  misc_feature 1..96: note = gRNA from S. pyogenes
  misc_difference 1..20: note = n is a, c, g, or u
  misc_feature 1..20: note = Targeting domain
  source 1..96: mol_type = other RNA
nnnnnnnnnnnnnnnnnnnngttttagagctagaaatagcaagttaaaataaggctagtccgttatcaacttgaaaaagtggcaccgagtcggtgc

SEQ ID NO: 49 - RNA, 96 nt, synthetic construct
  misc_feature 1..96: note = gRNA
  misc_difference 1..20: note = n is a, c, g, or u
  misc_feature 1..20: note = Targeting domain
  misc_feature 21..32: note = First complementarity domain
  misc_feature 33..36: note = Linking domain
  misc_feature 37..50: note = Second complementarity domain
  misc_feature 51..62: note = Proximal domain
  source 1..96: mol_type = other RNA
nnnnnnnnnnnnnnnnnnnngtattagagctagaaatagcaagttaatataaggctagtccgttatcaacttgaaaaagtggcaccgagtcggtgc

SEQ ID NO: 50 - RNA, 104 nt, synthetic construct
  misc_feature 1..104: note = gRNA
  misc_difference 1..20: note = n is a, c, g, or u
  misc_feature 1..20: note = Targeting domain
  misc_feature 21..36: note = First complementarity domain
  misc_feature 37..40: note = Linking domain
  misc_feature 41..58: note = Second complementarity domain
  source 1..104: mol_type = other RNA
nnnnnnnnnnnnnnnnnnnngttttagagctatgctgaaaagcatagcaagttaaaataaggctagtccgttatcaacttgaaaaagtggcaccgagtcggtgc

SEQ ID NO: 51 - RNA, 106 nt, synthetic construct
  misc_feature 1..106: note = gRNA
  misc_difference 1..20: note = n is a, c, g, or u
  misc_feature 1..20: note = Targeting domain
  misc_feature 21..37: note = First complementarity domain
  misc_feature 38..41: note = Linking domain
  misc_feature 42..60: note = Second complementarity domain
  source 1..106: mol_type = other RNA
nnnnnnnnnnnnnnnnnnnngttttagagctatgctggaaacagcatagcaagttaaaataaggctagtccgttatcaacttgaaaaagtggcaccgagtcggtgc

SEQ ID NO: 52 - protein, 12 aa, Peptoniphilus duerdenii
DIGTASVGWAVT

SEQ ID NO: 53 - protein, 12 aa, Treponema denticola
DVGTGSVGWAVT

SEQ ID NO: 54 - protein, 12 aa, Streptococcus mutans
DIGTNSVGWAVV

SEQ ID NO: 55 - protein, 12 aa, Streptococcus mutans
DIGTNSVGWAVI

SEQ ID NO: 56 - protein, 12 aa, Streptococcus mutans
DIGTNSVGWAVL

SEQ ID NO: 57 - protein, 12 aa, Streptococcus mutans
DLGTNSIGWAVV

SEQ ID NO: 58 - protein, 11 aa, Pedobacter glucosidilyticus
DLGTNSIGWAI

SEQ ID NO: 59 - protein, 12 aa, Streptococcus mutans
DLGTNSIGWALV

SEQ ID NO: 60 - protein, 12 aa, Fusobacterium nucleatum
DIGTNSVGWCVT

SEQ ID NO: 61 - protein, 12 aa, Streptococcus mutans
DIGTNSVGYAVT

SEQ ID NO: 62 - protein, 12 aa, Streptococcus mutans
DMGTGSLGWAVT

SEQ ID NO: 63 - protein, 12 aa, Streptococcus mutans
DIGTSSVGWAAI

SEQ ID NO: 64 - protein, 12 aa, Streptococcus mutans
DLGTGSVGWAVV

SEQ ID NO: 65 - protein, 12 aa, Streptococcus mutans
DLGVGSVGWAIV

SEQ ID NO: 66 - protein, 12 aa, Streptococcus mutans
DLGIASIGWAII

SEQ ID NO: 67 - protein, 12 aa, Streptococcus mutans
DLGIASVGWAIV

SEQ ID NO: 68 - protein, 12 aa, Streptococcus mutans
DLGVASVGWSIV

SEQ ID NO: 69 - protein, 12 aa, Eubacterium rectale
DIGIASVGWAIL

SEQ ID NO: 70 - protein, 12 aa, Streptococcus mutans
DLGISSVGWSVI

SEQ ID NO: 71 - protein, 12 aa, Streptococcus mutans
DIGIASVGWSVI

SEQ ID NO: 72 - protein, 12 aa, Streptococcus mutans
DVGIGSIGWAVI

SEQ ID NO: 73 - protein, 12 aa, Streptococcus mutans
DLGVGSIGFAIV

SEQ ID NO: 74 - protein, 12 aa, Akkermansia muciniphila
DIGYASIGWAVI

SEQ ID NO: 75 - protein, 12 aa, Prevotella ruminicola
DTGTNSLGWAIV

SEQ ID NO: 76 - protein, 12 aa, Candidatus Puniceispirillum marinum
DLGTNSIGWCLL

SEQ ID NO: 77 - protein, 12 aa, Rhodospirillum rubrum
DIGTDSLGWAVF

SEQ ID NO: 78 - protein, 12 aa, Streptococcus mutans
DIGSNSIGFAVV

SEQ ID NO: 79 - protein, 12 aa, Streptococcus mutans
DLGVGSIGVAVA

SEQ ID NO: 80 - protein, 12 aa, Rhodopseudomonas palustris
DLGIASCGWGVV

SEQ ID NO: 81 - protein, 12 aa, Streptococcus mutans
DLGIASVGWCLT

SEQ ID NO: 82 - protein, 12 aa, Streptococcus mutans
DIGIGSVGVGIL

SEQ ID NO: 83 - protein, 12 aa, Streptococcus mutans
DIGITSVGYGLI

SEQ ID NO: 84 - protein, 12 aa, Streptococcus mutans
DIGITSVGFGII

SEQ ID NO: 85 - protein, 12 aa, Streptococcus mutans
DVGITSTGYAVL

SEQ ID NO: 86 - protein, 12 aa, Streptococcus mutans
DLGITSFGYAIL

SEQ ID NO: 87 - protein, 12 aa, Streptococcus mutans
DIGNASVGWSAF

SEQ ID NO: 88 - protein, 12 aa, Lactobacillus gasseri
DVGTNSCGWVAM

SEQ ID NO: 89 - protein, 12 aa, Streptococcus mutans
DVGERSIGLAAV

SEQ ID NO: 90 - protein, 12 aa, Streptococcus mutans
DVGLNSVGLAAV

SEQ ID NO: 91 - protein, 12 aa, Bifidobacterium dentium
DVGLMSVGLAAI

SEQ ID NO: 92 - protein, 12 aa, Corynebacterium diphtheriae
DVGTFSVGLAAI

SEQ ID NO: 93 - protein, 12 aa, Streptococcus mutans
DIGTGSVGYACM

SEQ ID NO: 94 - protein, 12 aa, Capnocytophaga ochracea
DLGTTSIGFAHI

SEQ ID NO: 95 - protein, 12 aa, Prevotella denticola
DLGTNSIGSSVR

SEQ ID NO: 96 - protein, 12 aa, Ralstonia solanacearum
DIGTNSIGWAVI

SEQ ID NO: 97 - protein, 12 aa, Streptococcus mutans
DLGIASVGWAVV

SEQ ID NO: 98 - protein, 12 aa, Comamonas granuli
DIGIASVGWAVL

SEQ ID NO: 99 - protein, 12 aa, Streptococcus mutans
DIGIASIGWAVI

SEQ ID NO: 100 - protein, 12 aa, Agathobacter rectalis
DIGIASVGWAII

SEQ ID NO: 101 - protein, 12 aa, Streptococcus mutans
DVGIASVGWAVI

SEQ ID NO: 102 - protein, 11 aa, Streptococcus mutans
DIGIASVGWAL

SEQ ID NO: 103 - protein, 12 aa, Neisseria meningitidis
DIGIASVGWAMV

SEQ ID NO: 104 - protein, 12 aa, Clostridium perfringens
DIGITSVGWAVI

SEQ ID NO: 105 - protein, 12 aa, Streptococcus mutans
DLGISSLGWAIV

SEQ ID NO: 106 - protein, 12 aa, Streptococcus mutans
DLGTNSIGWGLL

SEQ ID NO: 107 - protein, 12 aa, Verminephrobacter eiseniae
DLGSTSLGWAIF

SEQ ID NO: 108 - protein, 12 aa, Streptococcus mutans
DIGISSIGWAFS

SEQ ID NO: 109 - protein, 12 aa, Streptococcus mutans
DIGTTSIGFSVI

SEQ ID NO: 110 - protein, 12 aa, Streptococcus mutans
DIGTSSIGWWLY

SEQ ID NO: 111 - protein, 12 aa, Streptococcus mutans
DLGSNSLGWFVT

SEQ ID NO: 112 - protein, 12 aa, Streptococcus mutans
DLGANSLGWFVV

SEQ ID NO: 113 - protein, 15 aa, Bacillus cereus
DIGLRIGITSCGWSI

SEQ ID NO: 114 - protein, 12 aa, Sutterella wadsworthensis
DMGAKYTGVFYA

SEQ ID NO: 115 - protein, 12 aa, Streptococcus mutans
DLGGKNTGFFSF

SEQ ID NO: 116 - protein, 12 aa, Francisella tularensis
DLGVKNTGVFSA

SEQ ID NO: 117 - protein, 12 aa, Streptococcus mutans
DLGAKFTGVALY

SEQ ID NO: 118 - protein, 12 aa, Streptococcus mutans
DLGGKFTGVCLS

SEQ ID NO: 119 - protein, 12 aa, Parasutterella excrementihominis
DLGGTYTGTFIT

SEQ ID NO: 120 - protein, 12 aa, Streptococcus mutans
DIGTNSVGWAVT

SEQ ID NO: 121 - protein, 12 aa, Eubacterium yurii
DVGTNSVGWAVT

SEQ ID NO: 122 - protein, 12 aa, Butyrivibrio hungatei
DMGTNSVGWAVT

SEQ ID NO: 123 - protein, 12 aa, Streptococcus mutans
DVGTSSVGWAVT

SEQ ID NO: 124 - protein, 27 aa, Treponema denticola
DIDHIYPQSKIKDDSISNRVLVCSSCN

SEQ ID NO: 125 - protein, 27 aa, Streptococcus mutans
DIDHIYPQSKTMDDSLNNRVLVKKNYN

SEQ ID NO: 126 - protein, 27 aa, Peptoniphilus duerdenii
DQDHIYPKSKIYDDSLENRVLVKKNLN

SEQ ID NO: 127 - protein, 27 aa, Streptococcus mutans
QIDHIVPQSLVKDDSFDNRVLVVPSEN

SEQ ID NO: 128 - protein, 27 aa, Streptococcus mutans
DIDHIIPQAFIKDNSIDNRVLTSSKEN

SEQ ID NO: 129 - protein, 27 aa, Streptococcus mutans
DIDHIIPQAFLKDNSIDNKVLVSSASN

SEQ ID NO: 130 - protein, 27 aa, Streptococcus mutans
DIDHIIPQAYTKDNSLDNRVLVSNITN

SEQ ID NO: 131 - protein, 27 aa, Streptococcus mutans
DIDHIVPQSFITDNSIDNLVLTSSAGN

SEQ ID NO: 132 - protein, 27 aa, Streptococcus mutans
DVDHIVPQSFLKDDSIDNKVLTRSDKN

SEQ ID NO: 133 - protein, 27 aa, Streptococcus mutans
NIDHIYPQSMVKDDSLDNKVLVQSEIN

SEQ ID NO: 134 - protein, 27 aa, Streptococcus mutans
DIDHILPQSLIKDDSLDNRVLVNATIN

SEQ ID NO: 135 - protein, 27 aa, Lactobacillus gasseri
DIDHILPQSFIKDDSLENRVLVKKAVN

SEQ ID NO: 136 - protein, 27 aa, Streptococcus mutans
EVDHIFPRSFIKDDSIDNKVLVIKKMN

SEQ ID NO: 137 - protein, 27 aa, Olsenella uli
EVDHIIPRSYIKDDSFENKVLVYREEN

SEQ ID NO: 138 - protein, 27 aa, Streptococcus mutans
DIDHIIPQAVTQNDSIDNRVLVARAEN

SEQ ID NO: 139 - protein, 27 aa, Streptococcus mutans
EIDHIIPYSISFDDSSSNKLLVLAESN

SEQ ID NO: 140 - protein, 27 aa, Streptococcus mutans
EIDHIIPYSLCFDDSSANKVLVHKQSN

SEQ ID NO: 141 - protein, 27 aa, Streptococcus mutans
DIDHIIPYSRSMDDSYSNKVLVLSGEN

SEQ ID NO: 142 - protein, 27 aa, Streptococcus mutans
DIDHIIPYSKSMDDSFNNKVLCLAEEN

SEQ ID NO: 143 - protein, 27 aa, Campylobacter jejuni
EIDHIYPYSRSFDDSYMNKVLVFTKQN

SEQ ID NO: 144 - protein, 27 aa, Streptococcus mutans
QIDHIYPYSRSMDDSYMNKVLVLTDEN

SEQ ID NO: 145 - protein, 27 aa, Clostridium perfringens
EIDHIIPFSRSFDDSLSNKILVLGSEN

SEQ ID NO: 146 - protein, 27 aa, Streptococcus mutans
EIDHALPFSRTWDDSFNNKVLVLGSEN

SEQ ID NO: 147 - protein, 27 aa, Streptococcus mutans
EIDHALPFSRTWDDSFNNKVLVLASEN

SEQ ID NO: 148 - protein, 27 aa, Streptococcus mutans
EIDHIIPISISLDDSINNKVLVLSKAN

SEQ ID NO: 149 - protein, 27 aa, Streptococcus mutans
EVDHIIPISISLDDSITNKVLVTHREN

SEQ ID NO: 150 - protein, 27 aa, Acidovorax ebreus
QVDHALPYSRSYDDSKNNKVLVLTHEN

SEQ ID NO: 151 - protein, 27 aa, Streptococcus mutans
EVDHILPLSITFDDSLANKVLVYATAN

SEQ ID NO: 152 - protein, 27 aa, Eubacterium rectale
EIDHIIPRSISFDDARSNKVLVYRSEN

SEQ ID NO: 153 - protein, 27 aa, Streptococcus mutans
EVDHIIPRSVSFDNSYHNKVLVKQSEN

SEQ ID NO: 154 - protein, 27 aa, Roseburia intestinalis
DIDHILPYSITFDDSFRNKVLVTSQEN

SEQ ID NO: 155 - protein, 27 aa, Streptococcus mutans
EIDHILPRSRSADDSFANKVLCLARAN

SEQ ID NO: 156 - protein, 27 aa, Candidatus Puniceispirillum marinum
EIEHLLPFSLTLDDSMANKTVCFRQAN

SEQ ID NO: 157 - protein, 27 aa, Streptococcus mutans
DIDHILPFSVSLDDSAANKVVCLREAN

SEQ ID NO: 158 - protein, 27 aa, Streptococcus mutans
DIDHLIPFSISWDDSAANKVVCMRYAN

SEQ ID NO: 159 - protein, 27 aa, Streptococcus mutans
DIDHILPVAMTLDDSPANKIICMRYAN

SEQ ID NO: 160 - protein, 27 aa, Dinoroseobacter shibae
DVDHILPYSRTLDDSFPNRTLCLREAN

SEQ ID NO: 161 - protein, 27 aa, Verminephrobacter eiseniae
EIEHILPFSRTLDDSLNNRTVAMRRAN

SEQ ID NO: 162 - protein, 27 aa, Streptococcus mutans
EVDHIIPYSISWDDSYTNKVLTSAKCN

SEQ ID NO: 163 - protein, 27 aa, Rhodopseudomonas palustris
QVDHILPWSRFGDDSYLNKTLCTARSN

SEQ ID NO: 164 - protein, 27 aa, Streptococcus mutans
QVDHILPFSKTLDDSFANKVLAQHDAN

SEQ ID NO: 165 - protein, 27 aa, Streptococcus mutans
QIDHAFPLSRSLDDSQSNKVLCLTSSN

SEQ ID NO: 166 - protein, 27 aa, Streptococcus mutans
DIDHIVPRSISFDDSFSNLVIVNKLDN

SEQ ID NO: 167 - protein, 27 aa, Streptococcus mutans
EIEHIIPYSMSYDNSQANKILTEKAEN

SEQ ID NO: 168 - protein, 27 aa, Streptococcus mutans
EIDHVIPYSKSADDSWFNKLLVKKSTN

SEQ ID NO: 169 - protein, 27 aa, Streptococcus mutans
EMDHILPYSRSLDNGWHNRVLVHGKDN

SEQ ID NO: 170 - protein, 27 aa, Streptococcus mutans
EVDHIVPYSLILDNTINNKALVYAEEN

SEQ ID NO: 171 - protein, 27 aa, Fibrobacter succinogenes
EIEHVIPQSLYFDDSFSNKVICEAEVN

SEQ ID NO: 172 - protein, 27 aa, Streptococcus mutans
DIEHIIPQARLFDDSFSNKTLEARSVN

SEQ ID NO: 173 - protein, 27 aa, Capnocytophaga sputigena
EIEHIVPKARVFDDSFSNKTLTFHRIN

SEQ ID NO: 174 - protein, 28 aa, Finegoldia magna
DKDHIIPQSMKKDDSIINNLVLVNKNAN

SEQ ID NO: 175 - protein, 27 aa, Streptococcus mutans
EVEHIWPRSRSFDNSPRNKTLCRKDVN

SEQ ID NO: 176 - protein, 27 aa, Bacillus cereus
IVNHIIPYNRSFDDTYHNRVLTLTETK

SEQ ID NO: 177 - protein, 27 aa, Prevotella micans
DMEHTIPKSISFDNSDQNLTLCESYYN

SEQ ID NO: 178 - protein, 27 aa, Prevotella ruminicola
DIEHTIPRSAGGDSTKMNLTLCSSRFN

SEQ ID NO: 179 - protein, 27 aa, Flavobacterium columnare
DIEHTIPRSISQDNSQMNKTLCSLKFN

SEQ ID NO: 180 - protein, 27 aa, Rhodospirillum rubrum
DIDHVIPLARGGRDSLDNMVLCQSDAN

SEQ ID NO: 181 - protein, 27 aa, Streptococcus mutans
DIEHLFPIAESEDNGRNNLVISHSACN

SEQ ID NO: 182 - protein, 27 aa, Streptococcus mutans
DVDHIFPRDDTADNSYGNKVVAHRQCN

SEQ ID NO: 183 - protein, 27 aa, Streptococcus mutans
DIEHIVPQSLGGLSTDYNTIVTLKSVN

SEQ ID NO: 184 - protein, 27 aa, Streptococcus mutans
ELDHIVPRTDGGSNRHENLAITCGACN

SEQ ID NO: 185 - protein, 28 aa, Streptococcus mutans
EMDHIVPRKGVGSTNTRTNFAAVCAECN

SEQ ID NO: 186 - protein, 28 aa, Bifidobacterium dentium
EMDHIVPRKGVGSTNTRVNLAAACAACN

SEQ ID NO: 187 - protein, 28 aa, Corynebacterium diphtheriae
EMDHIVPRAGQGSTNTRENLVAVCHRCN

SEQ ID NO: 188 - protein, 33 aa, Sutterella wadsworthensis
EIDHILPRSLIKDARGIVFNAEPNLIYASSRGN

SEQ ID NO: 189 - protein, 33 aa, Streptococcus mutans
EIDHIIPRSLTGRTKKTVFNSEANLIYCSSKGN

SEQ ID NO: 190 - protein, 33 aa, Parasutterella excrementihominis
EIDHIIPRSLTLKKSESIYNSEVNLIFVSAQGN

SEQ ID NO: 191 - protein, 33 aa, Streptococcus mutans
EIDHIYPRSLSKKHFGVIFNSEVNLIYCSSQGN

SEQ ID NO: 192 - protein, 33 aa, Streptococcus mutans
EIDHILPRSHTLKIYGTVFNPEGNLIYVHQKCN

SEQ ID NO: 193 - protein, 30 aa, Francisella tularensis
ELDHIIPRSHKKYGTLNDEANLICVTRGDN

SEQ ID NO: 194 - protein, 27 aa, Akkermansia muciniphila
ELEHIVPHSFRQSNALSSLVLTWPGVN

SEQ ID NO: 195 - protein, 27 aa, Streptococcus mutans
DIDHIYPRSKIKDDSITNRVLVEKDIN

SEQ ID NO: 196 - protein, 28 aa, Streptococcus mutans
YDIDHIYPRSLTKDDSFDNLVLCERTAN

SEQ ID NO: 197 - protein, 28 aa, Fusobacterium nucleatum
DIDHIYPRSKVIKDDSFDNLVLVLKNEN

SEQ ID NO: 198 - protein, 27 aa, Filifactor alocis
DRDHIYPQSKIKDDSIDNLVLVNKTYN

SEQ ID NO: 199-250 - skipped (52 entries)

SEQ ID NO: 251 - RNA, 17 nt, synthetic construct
  misc_feature 1..17: note = Targeting domain
  source 1..17: mol_type = other RNA
gaaggaaactagctaaa

SEQ ID NO: 252 - RNA, 20 nt, synthetic construct
  misc_feature 1..20: note = Targeting domain
  source 1..20: mol_type = other RNA
ggagaaggaaactagctaaa

SEQ ID NO: 253 - RNA, 20 nt, synthetic construct
  misc_feature 1..20: note = Targeting domain
  source 1..20: mol_type = other RNA
gggagaaggaaactagctaa

SEQ ID NO: 254 - RNA, 20 nt, synthetic construct
  misc_feature 1..20: note = Targeting domain
  source 1..20: mol_type = other RNA
gtatcctctatgatgggaga

SEQ ID NO: 255 - RNA, 20 nt, synthetic construct
  misc_feature 1..20: note = Targeting domain
  source 1..20: mol_type = other RNA
gtttccttctcccatcatag

SEQ ID NO: 256 - RNA, 20 nt, synthetic construct
  misc_feature 1..20: note = Targeting domain
  source 1..20: mol_type = other RNA
gtcctggtatcctctatgat

SEQ ID NO: 257 - RNA, 17 nt, synthetic construct
  misc_feature 1..17: note = Targeting domain
  source 1..17: mol_type = other RNA
agaaggaaactagctaa

SEQ ID NO: 258 - RNA, 17 nt, synthetic construct
  misc_feature 1..17: note = Targeting domain
  source 1..17: mol_type = other RNA
tcctctatgatgggaga

SEQ ID NO: 259 - RNA, 17 nt, synthetic construct
  misc_feature 1..17: note = Targeting domain
  source 1..17: mol_type = other RNA
cctggtatcctctatga

SEQ ID NO: 260 - RNA, 17 nt, synthetic construct
  misc_feature 1..17: note = Targeting domain
  source 1..17: mol_type = other RNA
ccatcatagaggatacc

SEQ ID NO: 261 - RNA, 17 nt, synthetic construct
  misc_feature 1..17: note = Targeting domain
  source 1..17: mol_type = other RNA
tccttctcccatcatag

SEQ ID NO: 262 - RNA, 17 nt, synthetic construct
  misc_feature 1..17: note = Targeting domain
  source 1..17: mol_type = other RNA
tagcagtatcctcttgg

SEQ ID NO: 263 - RNA, 17 nt, synthetic construct
  misc_feature 1..17: note = Targeting domain
  source 1..17: mol_type = other RNA
ttagcagtatcctcttg

SEQ ID NO: 264 - RNA, 17 nt, synthetic construct
  misc_feature 1..17: note = Targeting domain
  source 1..17: mol_type = other RNA
aactggaatgactgaat

SEQ ID NO: 265 - RNA, 17 nt, synthetic construct
  misc_feature 1..17: note = Targeting domain
  source 1..17: mol_type = other RNA
ctggtatcctctatgat

SEQ ID NO: 266 - RNA, 17 nt, synthetic construct
  misc_feature 1..17: note = Targeting domain
  source 1..17: mol_type = other RNA
aattagcagtatcctct

SEQ ID NO: 267 - RNA, 17 nt, synthetic construct
  misc_feature 1..17: note = Targeting domain
  source 1..17: mol_type = other RNA
attagcagtatcctctt

SEQ ID NO: 268 - RNA, 20 nt, synthetic construct
  misc_feature 1..20: note = Targeting domain
  source 1..20: mol_type = other RNA
agtcctggtatcctctatga

SEQ ID NO: 269 - RNA, 20 nt, synthetic construct
  misc_feature 1..20: note = Targeting domain
  source 1..20: mol_type = other RNA
ctcccatcatagaggatacc

SEQ ID NO: 270 - RNA, 20 nt, synthetic construct
  misc_feature 1..20: note = Targeting domain
  source 1..20: mol_type = other RNA
aattagcagtatcctcttgg

SEQ ID NO: 271 - RNA, 20 nt, synthetic construct
  misc_feature 1..20: note = Targeting domain
  source 1..20: mol_type = other RNA
aaattagcagtatcctcttg

SEQ ID NO: 272 - RNA, 20 nt, synthetic construct
  misc_feature 1..20: note = Targeting domain
  source 1..20: mol_type = other RNA
aaaaactggaatgactgaat

SEQ ID NO: 273 - RNA, 20 nt, synthetic construct
  misc_feature 1..20: note = Targeting domain
  source 1..20: mol_type = other RNA
aaaaattagcagtatcctct

SEQ ID NO: 274 - RNA, 20 nt, synthetic construct
  misc_feature 1..20: note = Targeting domain
  source 1..20: mol_type = other RNA
aaaattagcagtatcctctt

SEQ ID NO: 275 - RNA, 17 nt, synthetic construct
  misc_feature 1..17: note = Targeting domain
  source 1..17: mol_type = other RNA
gaatcggaacaaggcaa

SEQ ID NO: 276 - RNA, 17 nt, synthetic construct
  misc_feature 1..17: note = Targeting domain
  source 1..17: mol_type = other RNA
gaccaatagccttgaca

SEQ ID NO: 277 - RNA, 17 nt, synthetic construct
  misc_feature 1..17: note = Targeting domain
  source 1..17: mol_type = other RNA
ggctattggtcaaggca

SEQ ID NO: 278 - RNA, 17 nt, synthetic construct
  misc_feature 1..17: note = Targeting domain
  source 1..17: mol_type = other RNA
gtcaaggctattggtca

SEQ ID NO: 279 - RNA, 17 nt, synthetic construct
  misc_feature 1..17: note = Targeting domain
  source 1..17: mol_type = other RNA
gtgtgtggaactgctga

SEQ ID NO: 280 - RNA, 17 nt, synthetic construct
  misc_feature 1..17: note = Targeting domain
  source 1..17: mol_type = other RNA
gggccggcggctggcta

SEQ ID NO: 281 - RNA, 17 nt, synthetic construct
  misc_feature 1..17: note = Targeting domain
  source 1..17: mol_type = other RNA
gagtatccagtgaggcc

SEQ ID NO: 282 - RNA, 17 nt, synthetic construct
  misc_feature 1..17: note = Targeting domain
  source 1..17: mol_type = other RNA
gctgacaaaagaagtcc

SEQ ID NO: 283 - RNA, 17 nt, synthetic construct
  misc_feature 1..17: note = Targeting domain
  source 1..17: mol_type = other RNA
ggccaggggccggcggc

SEQ ID NO: 284 - RNA, 17 nt, synthetic construct
  misc_feature 1..17: note = Targeting domain
  source 1..17: mol_type = other RNA
gggaaggggcccccaag

SEQ ID NO: 285 - RNA, 17 nt, synthetic construct
  misc_feature 1..17: note = Targeting domain
  source 1..17: mol_type = other RNA
gagatagtgtggggaag

SEQ ID NO: 286 - RNA, 17 nt, synthetic construct
  misc_feature 1..17: note = Targeting domain
  source 1..17: mol_type = other RNA
gtatccagtgaggccag

SEQ ID NO: 287 - RNA, 17 nt, synthetic construct
  misc_feature 1..17: note = Targeting domain
  source 1..17: mol_type = other RNA
gtgaggccaggggccgg

SEQ ID NO: 288 - RNA, 17 nt, synthetic construct
  misc_feature 1..17: note = Targeting domain
  source 1..17: mol_type = other RNA
gctggccaacccatggg

SEQ ID NO: 289 - RNA, 17 nt, synthetic construct
  misc_feature 1..17: note = Targeting domain
  source 1..17: mol_type = other RNA
ggctaaactccacccat

SEQ ID NO: 290 - RNA, 17 nt, synthetic construct
  misc_feature 1..17: note = Targeting domain
  source 1..17: mol_type = other RNA
ggatactctaagactat

SEQ ID NO: 291 - RNA, 17 nt, synthetic construct
  misc_feature 1..17: note = Targeting domain
  source 1..17: mol_type = other RNA
ggggccggcggctggct

SEQ ID NO: 292 - RNA, 20 nt, synthetic construct
  misc_feature 1..20: note = Targeting domain
  source 1..20: mol_type = other RNA
ggctagggatgaagaataaa

SEQ ID NO: 293 - RNA, 20 nt, synthetic construct
  misc_feature 1..20: note = Targeting domain
  source 1..20: mol_type = other RNA
gagtgtgtggaactgctgaa

SEQ ID NO: 294 - RNA, 20 nt, synthetic construct
  misc_feature 1..20: note = Targeting domain
  source 1..20: mol_type = other RNA
ggaatgactgaatcggaaca

SEQ ID NO: 295 - RNA, 20 nt, synthetic construct
  misc_feature 1..20: note = Targeting domain
  source 1..20: mol_type = other RNA
gcattgagatagtgtgggga

SEQ ID NO: 296 - RNA, 20 nt, synthetic construct
  misc_feature 1..20: note = Targeting domain
  source 1..20: mol_type = other RNA
gctattggtcaaggcaaggc

SEQ ID NO: 297 - RNA, 20 nt, synthetic construct
  misc_feature 1..20: note = Targeting domain
  source 1..20: mol_type = other RNA
gtggggaaggggcccccaag

SEQ ID NO: 298 - RNA, 20 nt, synthetic construct
  misc_feature 1..20: note = Targeting domain
  source 1..20: mol_type = other RNA
ggcaaggctggccaacccat

SEQ ID NO: 299 - RNA, 20 nt, synthetic construct
  misc_feature 1..20: note = Targeting domain
  source 1..20: mol_type = other RNA
gtttgccttgtcaaggctat

SEQ ID NO: 300 - RNA, 20 nt, synthetic construct
  misc_feature 1..20: note = Targeting domain
  source 1..20: mol_type = other RNA
gctaaactccacccatgggt

SEQ ID NO: 301 - RNA, 17 nt, synthetic construct
  misc_feature 1..17: note = Targeting domain
  source 1..17: mol_type = other RNA
caaatatctgtctgaaa

SEQ ID NO: 302 - RNA, 17 nt, synthetic construct
  misc_feature 1..17: note = Targeting domain
  source 1..17: mol_type = other RNA
tagggatgaagaataaa

SEQ ID NO: 303 - RNA, 17 nt, synthetic construct
  misc_feature 1..17: note = Targeting domain
  source 1..17: mol_type = other RNA
tgagatagtgtggggaa

SEQ ID NO: 304 - RNA, 17 nt, synthetic construct
  misc_feature 1..17: note = Targeting domain
  source 1..17: mol_type = other RNA
tgtgtggaactgctgaa

SEQ ID NO: 305 - RNA, 17 nt, synthetic construct
  misc_feature 1..17: note = Targeting domain
  source 1..17: mol_type = other RNA
atgactgaatcggaaca

SEQ ID NO: 306 - RNA, 17 nt, synthetic construct
  misc_feature 1..17: note = Targeting domain
  source 1..17: mol_type = other RNA
caaggctggccaaccca

SEQ ID NO: 307 - RNA, 17 nt, synthetic construct
  misc_feature 1..17: note = Targeting domain
  source 1..17: mol_type = other RNA
tggctaaactccaccca

SEQ ID NO: 308 - RNA, 17 nt, synthetic construct
  misc_feature 1..17: note = Targeting domain
  source 1..17: mol_type = other RNA
tgggtggagtttagcca

SEQ ID NO: 309 - RNA, 17 nt, synthetic construct
  misc_feature 1..17: note = Targeting domain
  source 1..17: mol_type = other RNA
agtatccagtgaggcca

SEQ ID NO: 310 - RNA, 17 nt, synthetic construct
  misc_feature 1..17: note = Targeting domain
  source 1..17: mol_type = other RNA
tcaagtttgccttgtca

SEQ ID NO: 311 - RNA, 17 nt, synthetic construct
  misc_feature 1..17: note = Targeting domain
  source 1..17: mol_type = other RNA
ttgagatagtgtgggga

SEQ ID NO: 312 - RNA, 17 nt, synthetic construct
  misc_feature 1..17: note = Targeting domain
  source 1..17: mol_type = other RNA
ataaattagagaaaaac

SEQ ID NO: 313 - RNA, 17 nt, synthetic construct
  misc_feature 1..17: note = Targeting domain
  source 1..17: mol_type = other RNA
ccggcccctggcctcac

SEQ ID NO: 314 - RNA, 17 nt, synthetic construct
  misc_feature 1..17: note = Targeting domain
  source 1..17: mol_type = other RNA
agccagccgccggcccc

SEQ ID NO: 315 - RNA, 17 nt, synthetic construct
  misc_feature 1..17: note = Targeting domain
  source 1..17: mol_type = other RNA
ctgtctgaaacggtccc

SEQ ID NO: 316 - RNA, 17 nt, synthetic construct
  misc_feature 1..17: note = Targeting domain
  source 1..17: mol_type = other RNA
atgggtggagtttagcc

SEQ ID NO: 317 - RNA, 17 nt, synthetic construct
  misc_feature 1..17: note = Targeting domain
  source 1..17: mol_type = other RNA
catccctagccagccgc

SEQ ID NO: 318 - RNA, 17 nt, synthetic construct
  misc_feature 1..17: note = Targeting domain
  source 1..17: mol_type = other RNA
attggtcaaggcaaggc

SEQ ID NO: 319 - RNA, 17 nt, synthetic construct
  misc_feature 1..17: note = Targeting domain
  source 1..17: mol_type = other RNA
ccagtgaggccaggggc

SEQ ID NO: 320 - RNA, 17 nt, synthetic construct
  misc_feature 1..17: note = Targeting domain
  source 1..17: mol_type = other RNA
ttccacacactcgcttc

SEQ ID NO: 321 - RNA, 17 nt, synthetic construct
  misc_feature 1..17: note = Targeting domain
  source 1..17: mol_type = other RNA
cgcttctggaacgtctg

SEQ ID NO: 322 - RNA, 17 nt, synthetic construct
  misc_feature 1..17: note = Targeting domain
  source 1..17: mol_type = other RNA
tcttagagtatccagtg

SEQ ID NO: 323 - RNA, 17 nt, synthetic construct
  misc_feature 1..17: note = Targeting domain
  source 1..17: mol_type = other RNA
tttgcattgagatagtg

SEQ ID NO: 324 - RNA, 17 nt, synthetic construct
  misc_feature 1..17: note = Targeting domain
  source 1..17: mol_type = other RNA
ttccagaagcgagtgtg

SEQ ID NO: 325 - RNA, 17 nt, synthetic construct
  misc_feature 1..17: note = Targeting domain
  source 1..17: mol_type = other RNA
tgcattgagatagtgtg

SEQ ID NO: 326 - RNA, 17 nt, synthetic construct
  misc_feature 1..17: note = Targeting domain
  source 1..17: mol_type = other RNA
aaggctggccaacccat

SEQ ID NO: 327 - RNA, 17 nt, synthetic construct
  misc_feature 1..17: note = Targeting domain
  source 1..17: mol_type = other RNA
tgccttgtcaaggctat

SEQ ID NO: 328 - RNA, 17 nt, synthetic construct
  misc_feature 1..17: note = Targeting domain
  source 1..17: mol_type = other RNA
aaactccacccatgggt

SEQ ID NO: 329 - RNA, 17 nt, synthetic construct
  misc_feature 1..17: note = Targeting domain
  source 1..17: mol_type = other RNA
ttgcattgagatagtgt

SEQ ID NO: 330 - RNA, 20 nt, synthetic construct
  misc_feature 1..20: note = Targeting domain
  source 1..20: mol_type = other RNA
atgcaaatatctgtctgaaa

SEQ ID NO: 331 - RNA, 20 nt, synthetic construct
  misc_feature 1..20: note = Targeting domain
  source 1..20: mol_type = other RNA
actgaatcggaacaaggcaa

SEQ ID NO: 332 - RNA, 20 nt, synthetic construct
  misc_feature 1..20: note = Targeting domain
  source 1..20: mol_type = other RNA
cattgagatagtgtggggaa

SEQ ID NO: 333 - RNA, 20 nt, synthetic construct
  misc_feature 1..20: note = Targeting domain
  source 1..20: mol_type = other RNA
cttgaccaatagccttgaca

SEQ ID NO: 334 - RNA, 20 nt, synthetic construct
  misc_feature 1..20: note = Targeting domain
  source 1..20: mol_type = other RNA
aggcaaggctggccaaccca

SEQ ID NO: 335 - RNA, 20 nt, synthetic construct
  misc_feature 1..20: note = Targeting domain
  source 1..20: mol_type = other RNA
ccctggctaaactccaccca

SEQ ID NO: 336 - RNA, 20 nt, synthetic construct
  misc_feature 1..20: note = Targeting domain
  source 1..20: mol_type = other RNA
ccatgggtggagtttagcca

SEQ ID NO: 337 - RNA, 20 nt, synthetic construct
  misc_feature 1..20: note = Targeting domain
  source 1..20: mol_type = other RNA
tagagtatccagtgaggcca

SEQ ID NO: 338 - RNA, 20 nt, synthetic construct
  misc_feature 1..20: note = Targeting domain
  source 1..20: mol_type = other RNA
caaggctattggtcaaggca

SEQ ID NO: 339 - RNA, 20 nt, synthetic construct
  misc_feature 1..20: note = Targeting domain
  source 1..20: mol_type = other RNA
cttgtcaaggctattggtca

SEQ ID NO: 340 - RNA, 20 nt, synthetic construct
  misc_feature 1..20: note = Targeting domain
  source 1..20: mol_type = other RNA
tggtcaagtttgccttgtca

SEQ ID NO: 341 - RNA, 20 nt, synthetic construct
  misc_feature 1..20: note = Targeting domain
  source 1..20: mol_type = other RNA
cgagtgtgtggaactgctga

SEQ ID NO: 342 - RNA, 20 nt, synthetic construct
  misc_feature 1..20: note = Targeting domain
  source 1..20: mol_type = other RNA
caggggccggcggctggcta

SEQ ID NO: 343 - RNA, 20 nt, synthetic construct
  misc_feature 1..20: note = Targeting domain
  source 1..20: mol_type = other RNA
agaataaattagagaaaaac

SEQ ID NO: 344 - RNA, 20 nt, synthetic construct
  misc_feature 1..20: note = Targeting domain
  source 1..20: mol_type = other RNA
ccgccggcccctggcctcac

SEQ ID NO: 345 - RNA, 20 nt, synthetic construct
  misc_feature 1..20: note = Targeting domain
  source 1..20: mol_type = other RNA
cctagccagccgccggcccc

SEQ ID NO: 346 - RNA, 20 nt, synthetic construct
  misc_feature 1..20: note = Targeting domain
  source 1..20: mol_type = other RNA
tatctgtctgaaacggtccc

SEQ ID NO: 347 - RNA, 20 nt, synthetic construct
  misc_feature 1..20: note = Targeting domain
  source 1..20: mol_type = other RNA
cccatgggtggagtttagcc

SEQ ID NO: 348 - RNA, 20 nt, synthetic construct
  misc_feature 1..20: note = Targeting domain
  source 1..20: mol_type = other RNA
ttagagtatccagtgaggcc

SEQ ID NO: 349 - RNA, 20 nt, synthetic construct
  misc_feature 1..20: note = Targeting domain
  source 1..20: mol_type = other RNA
acggctgacaaaagaagtcc

SEQ ID NO: 350 - RNA, 20 nt, synthetic construct
  misc_feature 1..20: note = Targeting domain
  source 1..20: mol_type = other RNA
cttcatccctagccagccgc

SEQ ID NO: 351 - RNA, 20 nt, synthetic construct
  misc_feature 1..20: note = Targeting domain
  source 1..20: mol_type = other RNA
tgaggccaggggccggcggc

SEQ ID NO: 352 - RNA, 20 nt, synthetic construct
  misc_feature 1..20: note = Targeting domain
  source 1..20: mol_type = other RNA
tatccagtgaggccaggggc

SEQ ID NO: 353 - RNA, 20 nt, synthetic construct
  misc_feature 1..20: note = Targeting domain
  source 1..20: mol_type = other RNA
cagttccacacactcgcttc

SEQ ID NO: 354 - RNA, 20 nt, synthetic construct
  misc_feature 1..20: note = Targeting domain
  source 1..20: mol_type = other RNA
attgagatagtgtggggaag

SEQ ID NO: 355 - RNA, 20 nt, synthetic construct
  misc_feature 1..20: note = Targeting domain
  source 1..20: mol_type = other RNA
agagtatccagtgaggccag

SEQ ID NO: 356 - RNA, 20 nt, synthetic construct
  misc_feature 1..20: note = Targeting domain
  source 1..20: mol_type = other RNA
ccagtgaggccaggggccgg

SEQ ID NO: 357 - RNA, 20 nt, synthetic construct
  misc_feature 1..20: note = Targeting domain
  source 1..20: mol_type = other RNA
aaggctggccaacccatggg

SEQ ID NO: 358 - RNA, 20 nt, synthetic construct
  misc_feature 1..20: note = Targeting domain
  source 1..20: mol_type = other RNA
actcgcttctggaacgtctg

SEQ ID NO: 359 - RNA, 20 nt, synthetic construct
  misc_feature 1..20: note = Targeting domain
  source 1..20: mol_type = other RNA
tagtcttagagtatccagtg

SEQ ID NO: 360 - RNA, 20 nt, synthetic construct
  misc_feature 1..20: note = Targeting domain
  source 1..20: mol_type = other RNA
atatttgcattgagatagtg

SEQ ID NO: 361 - RNA, 20 nt, synthetic construct
  misc_feature 1..20: note = Targeting domain
  source 1..20: mol_type = other RNA
acgttccagaagcgagtgtg

SEQ ID NO: 362 - RNA, 20 nt, synthetic construct
  misc_feature 1..20: note = Targeting domain
  source 1..20: mol_type = other RNA
atttgcattgagatagtgtg

SEQ ID NO: 363 - RNA, 20 nt, synthetic construct
  misc_feature 1..20: note = Targeting domain
  source 1..20: mol_type = other RNA
cctggctaaactccacccat

SEQ ID NO: 364 - RNA, 20 nt, synthetic construct
  misc_feature 1..20: note = Targeting domain
  source 1..20: mol_type = other RNA
actggatactctaagactat

SEQ ID NO: 365 - RNA, 20 nt, synthetic construct
  misc_feature 1..20: note = Targeting domain
  source 1..20: mol_type = other RNA
ccaggggccggcggctggct

SEQ ID NO: 366 - RNA, 20 nt, synthetic construct
  misc_feature 1..20: note = Targeting domain
  source 1..20: mol_type = other RNA
tatttgcattgagatagtgt

SEQ ID NO: 367 - RNA, 19 nt, synthetic construct
  misc_feature 1..19: note = Targeting domain
  source 1..19: mol_type = other RNA
gtttccttctcccatcata

SEQ ID NO: 368 - RNA, 23 nt, synthetic construct
  misc_feature 1..23: note = Targeting domain
  source 1..23: mol_type = other RNA
gctagtttccttctcccatcata

SEQ ID NO: 369 - RNA, 19 nt, synthetic construct
  misc_feature 1..19: note = Targeting domain
  source 1..19: mol_type = other RNA
gaataaattagagaaaaac

SEQ ID NO: 370 - RNA, 22 nt, synthetic construct
  misc_feature 1..22: note = Targeting domain
  source 1..22: mol_type = other RNA
gaagaataaattagagaaaaac

SEQ ID NO: 371 - RNA, 23 nt, synthetic construct
  misc_feature 1..23: note = Targeting domain
  source 1..23: mol_type = other RNA
ggaagaataaattagagaaaaac

SEQ ID NO: 372 - RNA, 24 nt, synthetic construct
  misc_feature 1..24: note = Targeting domain
  source 1..24: mol_type = other RNA
gggaagaataaattagagaaaaac

SEQ ID NO: 373 - RNA, 20 nt, synthetic construct
  misc_feature 1..20: note = Targeting domain
  source 1..20: mol_type = other RNA
gaaggaaactagctaaaggg

SEQ ID NO: 374 - RNA, 22 nt, synthetic construct
  misc_feature 1..22: note = Targeting domain
  source 1..22: mol_type = other RNA
gagaaggaaactagctaaaggg

SEQ ID NO: 375 - RNA, 23 nt, synthetic construct
  misc_feature 1..23: note = Targeting domain
  source 1..23: mol_type = other RNA
ggagaaggaaactagctaaaggg

SEQ ID NO: 376 - RNA, 24 nt, synthetic construct
  misc_feature 1..24: note = Targeting domain
  source 1..24: mol_type = other RNA
gggagaaggaaactagctaaaggg

SEQ ID NO: 377 - RNA, 18 nt, synthetic construct
  misc_feature 1..18: note = Targeting domain
  source 1..18: mol_type = other RNA
tttccttctcccatcata

SEQ ID NO: 378 - RNA, 20 nt, synthetic construct
  misc_feature 1..20: note = Targeting domain
  source 1..20: mol_type = other RNA
agtttccttctcccatcata

SEQ ID NO: 379 - RNA, 21 nt, synthetic construct
  misc_feature 1..21: note = Targeting domain
  source 1..21: mol_type = other RNA
tagtttccttctcccatcata

SEQ ID NO: 380 - RNA, 22 nt, synthetic construct
  misc_feature 1..22: note = Targeting domain
  source 1..22: mol_type = other RNA
ctagtttccttctcccatcata

SEQ ID NO: 381 - RNA, 24 nt, synthetic construct
  misc_feature 1..24: note = Targeting domain
  source 1..24: mol_type = other RNA
agctagtttccttctcccatcata

SEQ ID NO: 382 - RNA, 18 nt, synthetic construct
  misc_feature 1..18: note = Targeting domain
  source 1..18: mol_type = other RNA
agagaaaaactggaatga

SEQ ID NO: 383 - RNA, 19 nt, synthetic construct
  misc_feature 1..19: note = Targeting domain
  source 1..19: mol_type = other RNA
tagagaaaaactggaatga

SEQ ID NO: 384 - RNA, 20 nt, synthetic construct
  misc_feature 1..20: note = Targeting domain
  source 1..20: mol_type = other RNA
ttagagaaaaactggaatga

SEQ ID NO: 385 - RNA, 21 nt, synthetic construct
  misc_feature 1..21: note = Targeting domain
  source 1..21: mol_type = other RNA
attagagaaaaactggaatga

SEQ ID NO: 386 - RNA, 22 nt, synthetic construct
  misc_feature 1..22: note = Targeting domain
  source 1..22: mol_type = other RNA
aattagagaaaaactggaatga

SEQ ID NO: 387 - RNA, 23 nt, synthetic construct
  misc_feature 1..23: note = Targeting domain
  source 1..23: mol_type = other RNA
aaattagagaaaaactggaatga

SEQ ID NO: 388 - RNA, 24 nt, synthetic construct
  misc_feature 1..24: note = Targeting domain
  source 1..24: mol_type = other RNA
taaattagagaaaaactggaatga

SEQ ID NO: 389 - RNA, 18 nt, synthetic construct
  misc_feature 1..18: note = Targeting domain
  source 1..18: mol_type = other RNA
aataaattagagaaaaac

SEQ ID NO: 390 - RNA, 21 nt, synthetic construct
  misc_feature 1..21: note = Targeting domain
  source 1..21: mol_type = other RNA
aagaataaattagagaaaaac

SEQ ID NO: 391 - RNA, 18 nt, synthetic construct
  misc_feature 1..18: note = Targeting domain
  source 1..18: mol_type = other RNA
aggaaactagctaaaggg

SEQ ID NO: 392 - RNA, 19 nt, synthetic construct
  misc_feature 1..19: note = Targeting domain
  source 1..19: mol_type = other RNA
aaggaaactagctaaaggg

SEQ ID NO: 393 - RNA, 21 nt, synthetic construct
  misc_feature 1..21: note = Targeting domain
  source 1..21: mol_type = other RNA
agaaggaaactagctaaaggg

SEQ ID NO: 394 - RNA, 18 nt, synthetic construct
  misc_feature 1..18: note = Targeting domain
  source 1..18: mol_type = other RNA
tggggaaggggcccccaa

SEQ ID NO: 395 - RNA, 19 nt, synthetic construct
  misc_feature 1..19: note = Targeting domain
  source 1..19: mol_type = other RNA
gtggggaaggggcccccaa

SEQ ID NO: 396 - RNA, 20 nt, synthetic construct
  misc_feature 1..20: note = Targeting domain
  source 1..20: mol_type = other RNA
tgtggggaaggggcccccaa

SEQ ID NO: 397 - RNA, 21 nt, synthetic construct
  misc_feature 1..21: note = Targeting domain
  source 1..21: mol_type = other RNA
gtgtggggaaggggcccccaa

SEQ ID NO: 398 - RNA, 22 nt, synthetic construct
  misc_feature 1..22: note = Targeting domain
  source 1..22: mol_type = other RNA
agtgtggggaaggggcccccaa

SEQ ID NO: 399 - RNA, 23 nt, synthetic construct
  misc_feature 1..23: note = Targeting domain
  source 1..23: mol_type = other RNA
tagtgtggggaaggggcccccaa

SEQ ID NO: 400 - RNA, 24 nt, synthetic construct
  misc_feature 1..24: note = Targeting domain
  source 1..24: mol_type = other RNA
atagtgtggggaaggggcccccaa

SEQ ID NO: 401 - RNA, 18 nt, synthetic construct
  misc_feature 1..18: note = Targeting domain
  source 1..18: mol_type = other RNA
acctcagacgttccagaa

SEQ ID NO: 402 - RNA, 19 nt, synthetic construct
  misc_feature 1..19: note = Targeting domain
  source 1..19: mol_type = other RNA
aacctcagacgttccagaa

SEQ ID NO: 403 - RNA, 20 nt, synthetic construct
  misc_feature 1..20: note = Targeting domain
  source 1..20: mol_type = other RNA
taacctcagacgttccagaa

SEQ ID NO: 404 - RNA, 21 nt, synthetic construct
  misc_feature 1..21: note = Targeting domain
  source 1..21: mol_type = other RNA
ataacctcagacgttccagaa

SEQ ID NO: 405 - RNA, 22 nt, synthetic construct
  misc_feature 1..22: note = Targeting domain
  source 1..22: mol_type = other RNA
gataacctcagacgttccagaa

SEQ ID NO: 406 - RNA, 23 nt, synthetic construct
  misc_feature 1..23: note = Targeting domain
  source 1..23: mol_type = other RNA
tgataacctcagacgttccagaa

SEQ ID NO: 407 - RNA, 24 nt, synthetic construct
  misc_feature 1..24: note = Targeting domain
  source 1..24: mol_type = other RNA
ttgataacctcagacgttccagaa

SEQ ID NO: 408 - RNA, 18 nt, synthetic construct
  misc_feature 1..18: note = Targeting domain
  source 1..18: mol_type = other RNA
cgccggcccctggcctca

SEQ ID NO: 409 - RNA, 19 nt, synthetic construct
  misc_feature 1..19: note = Targeting domain
  source 1..19: mol_type = other RNA
ccgccggcccctggcctca

SEQ ID NO: 410 - RNA, 20 nt, synthetic construct
  misc_feature 1..20: note = Targeting domain
  source 1..20: mol_type = other RNA
gccgccggcccctggcctca

SEQ ID NO: 411 - RNA, 21 nt, synthetic construct
  misc_feature 1..21: note = Targeting domain
  source 1..21: mol_type = other RNA
agccgccggcccctggcctca

SEQ ID NO: 412 - RNA, 22 nt, synthetic construct
  misc_feature 1..22: note = Targeting domain
  source 1..22: mol_type = other RNA
cagccgccggcccctggcctca

SEQ ID NO: 413 - RNA, 23 nt, synthetic construct
  misc_feature 1..23: note = Targeting domain
  source 1..23: mol_type = other RNA
ccagccgccggcccctggcctca

SEQ ID NO: 414 - RNA, 24 nt, synthetic construct
  misc_feature 1..24: note = Targeting domain
  source 1..24: mol_type = other RNA
gccagccgccggcccctggcctca

SEQ ID NO: 415 - RNA, 18 nt, synthetic construct
  misc_feature 1..18: note = Targeting domain
  source 1..18: mol_type = other RNA
ggcaaggctggccaaccc

SEQ ID NO: 416 - RNA, 19 nt, synthetic construct
  misc_feature 1..19: note = Targeting domain
  source 1..19: mol_type = other RNA
aggcaaggctggccaaccc

SEQ ID NO: 417 - RNA, 20 nt, synthetic construct
  misc_feature 1..20: note = Targeting domain
  source 1..20: mol_type = other RNA
aaggcaaggctggccaaccc

SEQ ID NO: 418 - RNA, 21 nt, synthetic construct
  misc_feature 1..21: note = Targeting domain
  source 1..21: mol_type = other RNA
caaggcaaggctggccaaccc

SEQ ID NO: 419 - RNA, 22 nt, synthetic construct
  misc_feature 1..22: note = Targeting domain
  source 1..22: mol_type = other RNA
tcaaggcaaggctggccaaccc

SEQ ID NO: 420 - RNA, 23 nt, synthetic construct
  misc_feature 1..23: note = Targeting domain
  source 1..23: mol_type = other RNA
gtcaaggcaaggctggccaaccc

SEQ ID NO: 421 - RNA, 24 nt, synthetic construct
  misc_feature 1..24: note = Targeting domain
  source 1..24: mol_type = other RNA
ggtcaaggcaaggctggccaaccc

SEQ ID NO: 422 - RNA, 18 nt, synthetic construct
  misc_feature 1..18: note = Targeting domain
  source 1..18: mol_type = other RNA
ggctggccaacccatggg

SEQ ID NO: 423 - RNA, 19 nt, synthetic construct
  misc_feature 1..19: note = Targeting domain
  source 1..19: mol_type = other RNA
aggctggccaacccatggg

SEQ ID NO: 424 - RNA, 21 nt, synthetic construct
  misc_feature 1..21: note = Targeting domain
  source 1..21: mol_type = other RNA
caaggctggccaacccatggg

SEQ ID NO: 425 - RNA, 22 nt, synthetic construct
  misc_feature 1..22: note = Targeting domain
  source 1..22: mol_type = other RNA
gcaaggctggccaacccatggg

SEQ ID NO: 426 - RNA, 23 nt, synthetic construct
  misc_feature 1..23: note = Targeting domain
  source 1..23: mol_type = other RNA
ggcaaggctggccaacccatggg

SEQ ID NO: 427 - RNA, 24 nt, synthetic construct
  misc_feature 1..24: note = Targeting domain
  source 1..24: mol_type = other RNA
aggcaaggctggccaacccatggg

SEQ ID NO: 428 - RNA, 18 nt, synthetic construct
  misc_feature 1..18: note = Targeting domain
  source 1..18: mol_type = other RNA
gagtgtgtggaactgctg

SEQ ID NO: 429 - RNA, 19 nt, synthetic construct
  misc_feature 1..19: note = Targeting domain
  source 1..19: mol_type = other RNA
cgagtgtgtggaactgctg

SEQ ID NO: 430 - RNA, 20 nt, synthetic construct
  misc_feature 1..20: note = Targeting domain
  source 1..20: mol_type = other RNA
gcgagtgtgtggaactgctg

SEQ ID NO: 431 - RNA, 21 nt, synthetic construct
  misc_feature 1..21: note = Targeting domain
  source 1..21: mol_type = other RNA
agcgagtgtgtggaactgctg

SEQ ID NO: 432 - RNA, 22 nt, synthetic construct
  misc_feature 1..22: note = Targeting domain
  source 1..22: mol_type = other RNA
aagcgagtgtgtggaactgctg

SEQ ID NO: 433 - RNA, 23 nt, synthetic construct
  misc_feature 1..23: note = Targeting domain
  source 1..23: mol_type = other RNA
gaagcgagtgtgtggaactgctg

SEQ ID NO: 434 - RNA, 24 nt, synthetic construct
  misc_feature 1..24: note = Targeting domain
  source 1..24: mol_type = other RNA
agaagcgagtgtgtggaactgctg

SEQ ID NO: 435 - RNA, 18 nt, synthetic construct
  misc_feature 1..18: note = Targeting domain
  source 1..18: mol_type = other RNA
cctggctaaactccaccc

SEQ ID NO: 436 - RNA, 19 nt, synthetic construct
  misc_feature 1..19: note = Targeting domain
  source 1..19: mol_type = other RNA
ccctggctaaactccaccc

SEQ ID NO: 437 - RNA, 20 nt, synthetic construct
  misc_feature 1..20: note = Targeting domain
  source 1..20: mol_type = other RNA
tccctggctaaactccaccc

SEQ ID NO: 438 - RNA, 21 nt, synthetic construct
  misc_feature 1..21: note = Targeting domain
  source 1..21: mol_type = other RNA
gtccctggctaaactccaccc

SEQ ID NO: 439 - RNA, 22 nt, synthetic construct
  misc_feature 1..22: note = Targeting domain
  source 1..22: mol_type = other RNA
ggtccctggctaaactccaccc

SEQ ID NO: 440 - RNA, 23 nt, synthetic construct
  misc_feature 1..23: note = Targeting domain
  source 1..23: mol_type = other RNA
cggtccctggctaaactccaccc

SEQ ID NO: 441 - RNA, 24 nt, synthetic construct
  misc_feature 1..24: note = Targeting domain
  source 1..24: mol_type = other RNA
acggtccctggctaaactccaccc

SEQ ID NO: 442 - RNA, 18 nt, synthetic construct
  misc_feature 1..18: note = Targeting domain
  source 1..18: mol_type = other RNA
ggcggctggctagggatg

SEQ ID NO: 443 - RNA, 19 nt, synthetic construct
  misc_feature 1..19: note = Targeting domain
  source 1..19: mol_type = other RNA
cggcggctggctagggatg

SEQ ID NO: 444 - RNA, 20 nt, synthetic construct
  misc_feature 1..20: note = Targeting domain
  source 1..20: mol_type = other RNA
ccggcggctggctagggatg

SEQ ID NO: 445 - RNA, 21 nt, synthetic construct
  misc_feature 1..21: note = Targeting domain
  source 1..21: mol_type = other RNA
gccggcggctggctagggatg

SEQ ID NO: 446 - RNA, 22 nt, synthetic construct
  misc_feature 1..22: note = Targeting domain
  source 1..22: mol_type = other RNA
ggccggcggctggctagggatg

SEQ ID NO: 447 - RNA, 23 nt, synthetic construct
  misc_feature 1..23: note = Targeting domain
  source 1..23: mol_type = other RNA
gggccggcggctggctagggatg

SEQ ID NO: 448 - RNA, 24 nt, synthetic construct
  misc_feature 1..24: note = Targeting domain
  source 1..24: mol_type = other RNA
ggggccggcggctggctagggatg

SEQ ID NO: 449 - RNA, 18 nt, synthetic construct
  misc_feature 1..18: note = Targeting domain
  source 1..18: mol_type = other RNA
aggggccggcggctggct

SEQ ID NO: 450 - RNA, 19 nt, synthetic construct
  misc_feature 1..19: note = Targeting domain
  source 1..19: mol_type = other RNA
caggggccggcggctggct

SEQ ID NO: 451 - RNA, 21 nt, synthetic construct
  misc_feature 1..21: note = Targeting domain
  source 1..21: mol_type = other RNA
gccaggggccggcggctggct

SEQ ID NO: 452 - RNA, 22 nt, synthetic construct
  misc_feature 1..22: note = Targeting domain
  source 1..22: mol_type = other RNA
ggccaggggccggcggctggct

SEQ ID NO: 453 - RNA, 23 nt, synthetic construct
  misc_feature 1..23: note = Targeting domain
  source 1..23: mol_type = other RNA
aggccaggggccggcggctggct

SEQ ID NO: 454 - RNA, 24 nt, synthetic construct
  misc_feature 1..24: note = Targeting domain
  source 1..24: mol_type = other RNA
gaggccaggggccggcggctggct

SEQ ID NO: 455 - RNA, 18 nt, synthetic construct
  misc_feature 1..18: note = Targeting domain
  source 1..18: mol_type = other RNA
aaacttgaccaatagtct

SEQ ID NO: 456 - RNA, 19 nt, synthetic construct
  misc_feature 1..19: note = Targeting domain
  source 1..19: mol_type = other RNA
caaacttgaccaatagtct

SEQ ID NO: 457 - RNA, 20 nt, synthetic construct
  misc_feature 1..20: note = Targeting domain
  source 1..20: mol_type = other RNA
gcaaacttgaccaatagtct

SEQ ID NO: 458 - RNA, 21 nt, synthetic construct
  misc_feature 1..21: note = Targeting domain
  source 1..21: mol_type = other RNA
ggcaaacttgaccaatagtct

SEQ ID NO: 459 - RNA, 22 nt, synthetic construct
  misc_feature 1..22: note = Targeting domain
  source 1..22: mol_type = other RNA
aggcaaacttgaccaatagtct

SEQ ID NO: 460 - RNA, 23 nt, synthetic construct
  misc_feature 1..23: note = Targeting domain
  source 1..23: mol_type = other RNA
aaggcaaacttgaccaatagtct

SEQ ID NO: 461 - RNA, 24 nt, synthetic construct
  misc_feature 1..24: note = Targeting domain
  source 1..24: mol_type = other RNA
caaggcaaacttgaccaatagtct

SEQ ID NO: 462 - RNA, 18 nt, synthetic construct
  misc_feature 1..18: note = Targeting domain
  source 1..18: mol_type = other RNA
ttcagacagatatttgca

SEQ ID NO: 463 - RNA, 19 nt, synthetic construct
  misc_feature 1..19: note = Targeting domain
  source 1..19: mol_type = other RNA
tttcagacagatatttgca

SEQ ID NO: 464 - RNA, 20 nt, synthetic construct
  misc_feature 1..20: note = Targeting domain
  source 1..20: mol_type = other RNA
gtttcagacagatatttgca

SEQ ID NO: 465 - RNA, 21 nt, synthetic construct
  misc_feature 1..21: note = Targeting domain
  source 1..21: mol_type = other RNA
cgtttcagacagatatttgca

SEQ ID NO: 466 - RNA, 22 nt, synthetic construct
  misc_feature 1..22: note = Targeting domain
  source 1..22: mol_type = other RNA
ccgtttcagacagatatttgca

SEQ ID NO: 467 - RNA, 23 nt, synthetic construct
  misc_feature 1..23: note = Targeting domain
  source 1..23: mol_type = other RNA
accgtttcagacagatatttgca

SEQ ID NO: 468 - RNA, 24 nt, synthetic construct
  misc_feature 1..24: note = Targeting domain
  source 1..24: mol_type = other RNA
gaccgtttcagacagatatttgca

SEQ ID NO: 469 - RNA, 18 nt, synthetic construct
  misc_feature 1..18: note = Targeting domain
  source 1..18: mol_type = other RNA
agtttccttctcccatca

SEQ ID NO: 470 - RNA, 19 nt, synthetic construct
  misc_feature 1..19: note = Targeting domain
  source 1..19: mol_type = other RNA
tagtttccttctcccatca

SEQ ID NO: 471 - RNA, 20 nt, synthetic construct
  misc_feature 1..20: note = Targeting domain
  source 1..20: mol_type = other RNA
ctagtttccttctcccatca

SEQ ID NO: 472 - RNA, 21 nt, synthetic construct
  misc_feature 1..21: note = Targeting domain
  source 1..21: mol_type = other RNA
gctagtttccttctcccatca

SEQ ID NO: 473 - RNA, 22 nt, synthetic construct
  misc_feature 1..22: note = Targeting domain
  source 1..22: mol_type = other RNA
agctagtttccttctcccatca

SEQ ID NO: 474 - RNA, 23 nt, synthetic construct
  misc_feature 1..23: note = Targeting domain
  source 1..23: mol_type = other RNA
tagctagtttccttctcccatca

SEQ ID NO: 475 - RNA, 24 nt, synthetic construct
  misc_feature 1..24: note = Targeting domain
  source 1..24: mol_type = other RNA
ttagctagtttccttctcccatca

SEQ ID NO: 476 - RNA, 18 nt, synthetic construct
  misc_feature 1..18: note = Targeting domain
  source 1..18: mol_type = other RNA
attgagatagtgtgggga

SEQ ID NO: 477 - RNA, 19 nt, synthetic construct
  misc_feature 1..19: note = Targeting domain
  source 1..19: mol_type = other RNA
cattgagatagtgtgggga

SEQ ID NO: 478 - RNA, 21 nt, synthetic construct
  misc_feature 1..21: note = Targeting domain
  source 1..21: mol_type = other RNA
tgcattgagatagtgtgggga

SEQ ID NO: 479 - RNA, 22 nt, synthetic construct
  misc_feature 1..22: note = Targeting domain
  source 1..22: mol_type = other RNA
ttgcattgagatagtgtgggga

SEQ ID NO: 480 - RNA, 23 nt, synthetic construct
  misc_feature 1..23: note = Targeting domain
  source 1..23: mol_type = other RNA
tttgcattgagatagtgtgggga

SEQ ID NO: 481 - RNA, 24 nt, synthetic construct
  misc_feature 1..24: note = Targeting domain
  source 1..24: mol_type = other RNA
atttgcattgagatagtgtgggga

SEQ ID NO: 482 - RNA, 18 nt, synthetic construct
  misc_feature 1..18: note = Targeting domain
  source 1..18: mol_type = other RNA
tcccatcatagaggatac

SEQ ID NO: 483 - RNA, 19 nt, synthetic construct
  misc_feature 1..19: note = Targeting domain
  source 1..19: mol_type = other RNA
ctcccatcatagaggatac

SEQ ID NO: 484 - RNA, 20 nt, synthetic construct
  misc_feature 1..20: note = Targeting domain
  source 1..20: mol_type = other RNA
tctcccatcatagaggatac

SEQ ID NO: 485 - RNA, 21 nt, synthetic construct
  misc_feature 1..21: note = Targeting domain
  source 1..21: mol_type = other RNA
ttctcccatcatagaggatac

SEQ ID NO: 486 - RNA, 22 nt, synthetic construct
  misc_feature 1..22: note = Targeting domain
  source 1..22: mol_type = other RNA
cttctcccatcatagaggatac

SEQ ID NO: 487 - RNA, 23 nt, synthetic construct
  misc_feature 1..23: note = Targeting domain
  source 1..23: mol_type = other RNA
ccttctcccatcatagaggatac

SEQ ID NO: 488 - RNA, 24 nt, synthetic construct
  misc_feature 1..24: note = Targeting domain
  source 1..24: mol_type = other RNA
tccttctcccatcatagaggatac

SEQ ID NO: 489 - RNA, 18 nt, synthetic construct
  misc_feature 1..18: note = Targeting domain
  source 1..18: mol_type = other RNA
tgtggggaaggggccccc

SEQ ID NO: 490 - RNA, 19 nt, synthetic construct
  misc_feature 1..19: note = Targeting domain
  source 1..19: mol_type = other RNA
gtgtggggaaggggccccc

SEQ ID NO: 491 - RNA, 20 nt, synthetic construct
  misc_feature 1..20: note = Targeting domain
  source 1..20: mol_type = other RNA
agtgtggggaaggggccccc

SEQ ID NO: 492 - RNA, 21 nt, synthetic construct
  misc_feature 1..21: note = Targeting domain
  source 1..21: mol_type = other RNA
tagtgtggggaaggggccccc

SEQ ID NO: 493 - RNA, 22 nt, synthetic construct
  misc_feature 1..22: note = Targeting domain
  source 1..22: mol_type = other RNA
atagtgtggggaaggggccccc

SEQ ID NO: 494 - RNA, 23 nt, synthetic construct
  misc_feature 1..23: note = Targeting domain
  source 1..23: mol_type = other RNA
gatagtgtggggaaggggccccc

SEQ ID NO: 495 - RNA, 24 nt, synthetic construct
  misc_feature 1..24: note = Targeting domain
  source 1..24: mol_type = other RNA
agatagtgtggggaaggggccccc

SEQ ID NO: 496 - RNA, 18 nt, synthetic construct
  misc_feature 1..18: note = Targeting domain
  source 1..18: mol_type = other RNA
catgggtggagtttagcc

SEQ ID NO: 497 - RNA, 19 nt, synthetic construct
  misc_feature 1..19: note = Targeting domain
  source 1..19: mol_type = other RNA
ccatgggtggagtttagcc

SEQ ID NO: 498 - RNA, 21 nt, synthetic construct
  misc_feature 1..21: note = Targeting domain
  source 1..21: mol_type = other RNA
acccatgggtggagtttagcc

SEQ ID NO: 499 - RNA, 22 nt, synthetic construct
  misc_feature 1..22: note = Targeting domain
  source 1..22: mol_type = other RNA
aacccatgggtggagtttagcc

SEQ ID NO: 500 - RNA, 23 nt, synthetic construct
  misc_feature 1..23: note = Targeting domain
  source 1..23: mol_type = other RNA
caacccatgggtggagtttagcc

SEQ ID NO: 501 - RNA, 24 nt, synthetic construct
  misc_feature 1..24: note = Targeting domain
  source 1..24: mol_type = other RNA
ccaacccatgggtggagtttagcc

SEQ ID NO: 502 - RNA, 18 nt, synthetic construct
  misc_feature 1..18: note = Targeting domain
  source 1..18: mol_type = other RNA
ccatgggtggagtttagc

SEQ ID NO: 503 - RNA, 19 nt, synthetic construct
  misc_feature 1..19: note = Targeting domain
  source 1..19: mol_type = other RNA
cccatgggtggagtttagc

SEQ ID NO: 504 - RNA, 20 nt, synthetic construct
  misc_feature 1..20: note = Targeting domain
  source 1..20: mol_type = other RNA
acccatgggtggagtttagc

SEQ ID NO: 505 - RNA, 21 nt, synthetic construct
  misc_feature 1..21: note = Targeting domain
  source 1..21: mol_type = other RNA
aacccatgggtggagtttagc

SEQ ID NO: 506 - RNA, 22 nt, synthetic construct
  misc_feature 1..22: note = Targeting domain
  source 1..22: mol_type = other RNA
caacccatgggtggagtttagc

SEQ ID NO: 507 - RNA, 23 nt, synthetic construct
  misc_feature 1..23: note = Targeting domain
  source 1..23: mol_type = other RNA
ccaacccatgggtggagtttagc

SEQ ID NO: 508 - RNA, 24 nt, synthetic construct
  misc_feature 1..24: note = Targeting domain
  source 1..24: mol_type = other RNA
gccaacccatgggtggagtttagc

SEQ ID NO: 509 - RNA, 18 nt, synthetic construct
  misc_feature 1..18: note = Targeting domain
  source 1..18: mol_type = other RNA
tgataacctcagacgttc

SEQ ID NO: 510 - RNA, 19 nt, synthetic construct
  misc_feature 1..19: note = Targeting domain
  source 1..19: mol_type = other RNA
ttgataacctcagacgttc

SEQ ID NO: 511 - RNA, 20 nt, synthetic construct
  misc_feature 1..20: note = Targeting domain
  source 1..20: mol_type = other RNA
attgataacctcagacgttc

SEQ ID NO: 512 - RNA, 21 nt, synthetic construct
  misc_feature 1..21: note = Targeting domain
  source 1..21: mol_type = other RNA
tattgataacctcagacgttc

SEQ ID NO: 513 - RNA, 22 nt, synthetic construct
  misc_feature 1..22: note = Targeting domain
  source 1..22: mol_type = other RNA
ttattgataacctcagacgttc

SEQ ID NO: 514 - RNA, 23 nt, synthetic construct
  misc_feature 1..23: note = Targeting domain
  source 1..23: mol_type = other RNA
cttattgataacctcagacgttc

SEQ ID NO: 515 - RNA, 24 nt, synthetic construct
  misc_feature 1..24: note = Targeting domain
  source 1..24: mol_type = other RNA
gcttattgataacctcagacgttc

SEQ ID NO: 516 - RNA, 18 nt, synthetic construct
  misc_feature 1..18: note = Targeting domain
  source 1..18: mol_type = other RNA
cattgagatagtgtgggg

SEQ ID NO: 517 - RNA, 19 nt, synthetic construct
  misc_feature 1..19: note = Targeting domain
  source 1..19: mol_type = other RNA
gcattgagatagtgtgggg

SEQ ID NO: 518 - RNA, 20 nt, synthetic construct
  misc_feature 1..20: note = Targeting domain
  source 1..20: mol_type = other RNA
tgcattgagatagtgtgggg

SEQ ID NO: 519 - RNA, 21 nt, synthetic construct
  misc_feature 1..21: note = Targeting domain
  source 1..21: mol_type = other RNA
ttgcattgagatagtgtgggg

SEQ ID NO: 520 - RNA, 22 nt, synthetic construct
  misc_feature 1..22: note = Targeting domain
  source 1..22: mol_type = other RNA
tttgcattgagatagtgtgggg

SEQ ID NO: 521 - RNA, 23 nt, synthetic construct
  misc_feature 1..23: note = Targeting domain
  source 1..23: mol_type = other RNA
atttgcattgagatagtgtgggg

SEQ ID NO: 522 - RNA, 24 nt, synthetic construct
  misc_feature 1..24: note = Targeting domain
  source 1..24: mol_type = other RNA
tatttgcattgagatagtgtgggg

SEQ ID NO: 523 - RNA, 18 nt, synthetic construct
  misc_feature 1..18: note = Targeting domain
  source 1..18: mol_type = other RNA
aggctggccaacccatgg

SEQ ID NO: 524 - RNA, 19 nt, synthetic construct
  misc_feature 1..19: note = Targeting domain
  source 1..19: mol_type = other RNA
aaggctggccaacccatgg

SEQ ID NO: 525 - RNA, 20 nt, synthetic construct
  misc_feature 1..20: note = Targeting domain
  source 1..20: mol_type = other RNA
caaggctggccaacccatgg

SEQ ID NO: 526 - RNA, 21 nt, synthetic construct
  misc_feature 1..21: note = Targeting domain
  source 1..21: mol_type = other RNA
gcaaggctggccaacccatgg

SEQ ID NO: 527 - RNA, 22 nt, synthetic construct
  misc_feature 1..22: note = Targeting domain
  source 1..22: mol_type = other RNA
ggcaaggctggccaacccatgg

SEQ ID NO: 528 - RNA, 23 nt, synthetic construct
  misc_feature 1..23: note = Targeting domain
  source 1..23: mol_type = other RNA
aggcaaggctggccaacccatgg

SEQ ID NO: 529 - RNA, 24 nt, synthetic construct
  misc_feature 1..24: note = Targeting domain
  source 1..24: mol_type = other RNA
aaggcaaggctggccaacccatgg

SEQ ID NO: 530 - RNA, 18 nt, synthetic construct
  misc_feature 1..18: note = Targeting domain
  source 1..18: mol_type = other RNA
agcgagtgtgtggaactg

SEQ ID NO: 531 - RNA, 19 nt, synthetic construct
  misc_feature 1..19: note = Targeting domain
  source 1..19: mol_type = other RNA
aagcgagtgtgtggaactg

SEQ ID NO: 532 - RNA, 20 nt, synthetic construct
  misc_feature 1..20: note = Targeting domain
  source 1..20: mol_type = other RNA
gaagcgagtgtgtggaactg

SEQ ID NO: 533 - RNA, 21 nt, synthetic construct
  misc_feature 1..21: note = Targeting domain
  source 1..21: mol_type = other RNA
agaagcgagtgtgtggaactg

SEQ ID NO: 534 - RNA, 22 nt, synthetic construct
  misc_feature 1..22: note = Targeting domain
  source 1..22: mol_type = other RNA
cagaagcgagtgtgtggaactg

SEQ ID NO: 535 - RNA, 23 nt, synthetic construct
  misc_feature 1..23: note = Targeting domain
  source 1..23: mol_type = other RNA
ccagaagcgagtgtgtggaactg

SEQ ID NO: 536 - RNA, 24 nt, synthetic construct
  misc_feature 1..24: note = Targeting domain
  source 1..24: mol_type = other RNA
tccagaagcgagtgtgtggaactg

SEQ ID NO: 537 - RNA, 18 nt, synthetic construct
  misc_feature 1..18: note = Targeting domain
  source 1..18: mol_type = other RNA
atttgcattgagatagtg

SEQ ID NO: 538 - RNA, 19 nt, synthetic construct
  misc_feature 1..19: note = Targeting domain
  source 1..19: mol_type = other RNA
tatttgcattgagatagtg

SEQ ID NO: 539 - RNA, 21 nt, synthetic construct
  misc_feature 1..21: note = Targeting domain
  source 1..21: mol_type = other RNA
gatatttgcattgagatagtg

SEQ ID NO: 540 - RNA, 22 nt, synthetic construct
  misc_feature 1..22: note = Targeting domain
  source 1..22: mol_type = other RNA
agatatttgcattgagatagtg

SEQ ID NO: 541 - RNA, 23 nt, synthetic construct
  misc_feature 1..23: note = Targeting domain
  source 1..23: mol_type = other RNA
cagatatttgcattgagatagtg

SEQ ID NO: 542 - RNA, 24 nt, synthetic construct
  misc_feature 1..24: note = Targeting domain
  source 1..24: mol_type = other RNA
acagatatttgcattgagatagtg

SEQ ID NO: 543 - RNA, 18 nt, synthetic construct
  misc_feature 1..18: note = Targeting domain
  source 1..18: mol_type = other RNA
gttccagaagcgagtgtg

SEQ ID NO: 544 - RNA, 19 nt, synthetic construct
  misc_feature 1..19: note = Targeting domain
  source 1..19: mol_type = other RNA
cgttccagaagcgagtgtg

SEQ ID NO: 545 - RNA, 21 nt, synthetic construct
  misc_feature 1..21: note = Targeting domain
  source 1..21: mol_type = other RNA
gacgttccagaagcgagtgtg

SEQ ID NO: 546 - RNA, 22 nt, synthetic construct
  misc_feature 1..22: note = Targeting domain
  source 1..22: mol_type = other RNA
agacgttccagaagcgagtgtg

SEQ ID NO: 547 - RNA, 23 nt, synthetic construct
  misc_feature 1..23: note = Targeting domain
  source 1..23: mol_type = other RNA
cagacgttccagaagcgagtgtg

SEQ ID NO: 548 - RNA, 24 nt, synthetic construct
  misc_feature 1..24: note = Targeting domain
  source 1..24: mol_type = other RNA
tcagacgttccagaagcgagtgtg

SEQ ID NO: 549 - RNA, 18 nt, synthetic construct
  misc_feature 1..18: note = Targeting domain
  source 1..18: mol_type = other RNA
ttgcattgagatagtgtg

SEQ ID NO: 550 - RNA, 19 nt, synthetic construct
  misc_feature 1..19: note = Targeting domain
  source 1..19: mol_type = other RNA
tttgcattgagatagtgtg

SEQ ID NO: 551 - RNA, 21 nt, synthetic construct
  misc_feature 1..21: note = Targeting domain
  source 1..21: mol_type = other RNA
tatttgcattgagatagtgtg

SEQ ID NO: 552 - RNA, 22 nt, synthetic construct
  misc_feature 1..22: note = Targeting domain
  source 1..22: mol_type = other RNA
atatttgcattgagatagtgtg

SEQ ID NO: 553 - RNA, 23 nt, synthetic construct
  misc_feature 1..23: note = Targeting domain
  source 1..23: mol_type = other RNA
gatatttgcattgagatagtgtg

SEQ ID NO: 554 - RNA, 24 nt, synthetic construct
  misc_feature 1..24: note = Targeting domain
  source 1..24: mol_type = other RNA
agatatttgcattgagatagtgtg

SEQ ID NO: 555 - RNA, 18 nt, synthetic construct
  misc_feature 1..18: note = Targeting domain
  source 1..18: mol_type = other RNA
tatttgcattgagatagt

SEQ ID NO: 556 - RNA, 19 nt, synthetic construct
  misc_feature 1..19: note = Targeting domain
  source 1..19: mol_type = other RNA
atatttgcattgagatagt

SEQ ID NO: 557 - RNA, 20 nt, synthetic construct
  misc_feature 1..20: note = Targeting domain
  source 1..20: mol_type = other RNA
gatatttgcattgagatagt

SEQ ID NO: 558 - RNA, 21 nt, synthetic construct
  misc_feature 1..21: note = Targeting domain
  source 1..21: mol_type = other RNA
agatatttgcattgagatagt

SEQ ID NO: 559 - RNA, 22 nt, synthetic construct
  misc_feature 1..22: note = Targeting domain
  source 1..22: mol_type = other RNA
cagatatttgcattgagatagt

SEQ ID NO: 560 - RNA, 23 nt, synthetic construct
  misc_feature 1..23: note = Targeting domain
  source 1..23: mol_type = other RNA
acagatatttgcattgagatagt

SEQ ID NO: 561 - RNA, 24 nt, synthetic construct
  misc_feature 1..24: note = Targeting domain
  source 1..24: mol_type = other RNA
gacagatatttgcattgagatagt

SEQ ID NO: 562 - RNA, 18 nt, synthetic construct
  misc_feature 1..18: note = Targeting domain
  source 1..18: mol_type = other RNA
cgttccagaagcgagtgt

SEQ ID NO: 563 - RNA, 19 nt, synthetic construct
  misc_feature 1..19: note = Targeting domain
  source 1..19: mol_type = other RNA
acgttccagaagcgagtgt

SEQ ID NO: 564 - RNA, 20 nt, synthetic construct
  misc_feature 1..20: note = Targeting domain
  source 1..20: mol_type = other RNA
gacgttccagaagcgagtgt

SEQ ID NO: 565 - RNA, 21 nt, synthetic construct
  misc_feature 1..21: note = Targeting domain
  source 1..21: mol_type = other RNA
agacgttccagaagcgagtgt

SEQ ID NO: 566 - RNA, 22 nt, synthetic construct
  misc_feature 1..22: note = Targeting domain
  source 1..22: mol_type = other RNA
cagacgttccagaagcgagtgt

SEQ ID NO: 567 - RNA, 23 nt, synthetic construct
  misc_feature 1..23: note = Targeting domain
  source 1..23: mol_type = other RNA
tcagacgttccagaagcgagtgt

SEQ ID NO: 568 - RNA, 24 nt, synthetic construct
  misc_feature 1..24: note = Targeting domain
  source 1..24: mol_type = other RNA
ctcagacgttccagaagcgagtgt

SEQ ID NO: 569 - RNA, 18 nt, synthetic construct
  misc_feature 1..18: note = Targeting domain
  source 1..18: mol_type = other RNA
tttgcattgagatagtgt

SEQ ID NO: 570 - RNA, 19 nt, synthetic construct
  misc_feature 1..19: note = Targeting domain
  source 1..19: mol_type = other RNA
atttgcattgagatagtgt

SEQ ID NO: 571 - RNA, 21 nt, synthetic construct
  misc_feature 1..21: note = Targeting domain
  source 1..21: mol_type = other RNA
atatttgcattgagatagtgt

SEQ ID NO: 572 - RNA, 22 nt, synthetic construct
  misc_feature 1..22: note = Targeting domain
  source 1..22: mol_type = other RNA
gatatttgcattgagatagtgt

SEQ ID NO: 573 - RNA, 23 nt, synthetic construct
  misc_feature 1..23: note = Targeting domain
  source 1..23: mol_type = other RNA
agatatttgcattgagatagtgt

SEQ ID NO: 574 - RNA, 24 nt, synthetic construct
  misc_feature 1..24: note = Targeting domain
  source 1..24: mol_type = other RNA
cagatatttgcattgagatagtgt

SEQ ID NO: 575 - RNA, 18 nt, synthetic construct
  misc_feature 1..18: note = Targeting domain
  source 1..18: mol_type = other RNA
gaataaattagagaaaaa

SEQ ID NO: 576 - RNA, 19 nt, synthetic construct
  misc_feature 1..19: note = Targeting domain
  source 1..19: mol_type = other RNA
agaataaattagagaaaaa

SEQ ID NO: 577 - RNA, 20 nt, synthetic construct
  misc_feature 1..20: note = Targeting domain
  source 1..20: mol_type = other RNA
aagaataaattagagaaaaa

SEQ ID NO: 578 - RNA, 21 nt, synthetic construct
  misc_feature 1..21: note = Targeting domain
  source 1..21: mol_type = other RNA
gaagaataaattagagaaaaa

SEQ ID NO: 579 - RNA, 22 nt, synthetic construct
  misc_feature 1..22: note = Targeting domain
  source 1..22: mol_type = other RNA
ggaagaataaattagagaaaaa

SEQ ID NO: 580 - RNA, 23 nt, synthetic construct
  misc_feature 1..23: note = Targeting domain
  source 1..23: mol_type = other RNA
gggaagaataaattagagaaaaa

SEQ ID NO: 581 - RNA, 24 nt, synthetic construct
  misc_feature 1..24: note = Targeting domain
  source 1..24: mol_type = other RNA
agggaagaataaattagagaaaaa

SEQ ID NO: 582 - RNA, 18 nt, synthetic construct
  misc_feature 1..18: note = Targeting domain
  source 1..18: mol_type = other RNA
ctagggatgaagaataaa

SEQ ID NO: 583 - RNA, 19 nt, synthetic construct
  misc_feature 1..19: note = Targeting domain
  source 1..19: mol_type = other RNA
gctagggatgaagaataaa

SEQ ID NO: 584 - RNA, 21 nt, synthetic construct
  misc_feature 1..21: note = Targeting domain
  source 1..21: mol_type = other RNA
tggctagggatgaagaataaa

SEQ ID NO: 585 - RNA, 22 nt, synthetic construct
  misc_feature 1..22: note = Targeting domain
  source 1..22: mol_type = other RNA
ctggctagggatgaagaataaa

SEQ ID NO: 586 - RNA, 23 nt, synthetic construct
  misc_feature 1..23: note = Targeting domain
  source 1..23: mol_type = other RNA
gctggctagggatgaagaataaa

SEQ ID NO: 587 - RNA, 24 nt, synthetic construct
  misc_feature 1..24: note = Targeting domain
  source 1..24: mol_type = other RNA
ggctggctagggatgaagaataaa

SEQ ID NO: 588 - RNA, 18 nt, synthetic construct
  misc_feature 1..18: note = Targeting domain
  source 1..18: mol_type = other RNA
agaaggaaactagctaaa

SEQ ID NO: 589 - RNA, 19 nt, synthetic construct
  misc_feature 1..19: note = Targeting domain
  source 1..19: mol_type = other RNA
gagaaggaaactagctaaa

SEQ ID NO: 590 - RNA, 21 nt, synthetic construct
  misc_feature 1..21: note = Targeting domain
  source 1..21: mol_type = other RNA
gggagaaggaaactagctaaa

SEQ ID NO: 591 - RNA, 22 nt, synthetic construct
  misc_feature 1..22: note = Targeting domain
  source 1..22: mol_type = other RNA
tgggagaaggaaactagctaaa

SEQ ID NO: 592 - RNA, 23 nt, synthetic construct
  misc_feature 1..23: note = Targeting domain
  source 1..23: mol_type = other RNA
atgggagaaggaaactagctaaa

SEQ ID NO: 593 - RNA, 24 nt, synthetic construct
  misc_feature 1..24: note = Targeting domain
  source 1..24: mol_type = other RNA
gatgggagaaggaaactagctaaa

SEQ ID NO: 594 - RNA, 18 nt, synthetic construct
  misc_feature 1..18: note = Targeting domain
  source 1..18: mol_type = other RNA
aaaactggaatgactgaa

SEQ ID NO: 595 - RNA, 19 nt, synthetic construct
  misc_feature 1..19: note = Targeting domain
  source 1..19: mol_type = other RNA
aaaaactggaatgactgaa

SEQ ID NO: 596 - RNA, 20 nt, synthetic construct
  misc_feature 1..20: note = Targeting domain
  source 1..20: mol_type = other RNA
gaaaaactggaatgactgaa

SEQ ID NO: 597 - RNA, 21 nt, synthetic construct
  misc_feature 1..21: note = Targeting domain
  source 1..21: mol_type = other RNA
agaaaaactggaatgactgaa

SEQ ID NO: 598 - RNA, 22 nt, synthetic construct
  misc_feature 1..22: note = Targeting domain
  source 1..22: mol_type = other RNA
gagaaaaactggaatgactgaa

SEQ ID NO: 599 - RNA, 23 nt, synthetic construct
  misc_feature 1..23: note = Targeting domain
  source 1..23: mol_type = other RNA
agagaaaaactggaatgactgaa

SEQ ID NO: 600 - RNA, 24 nt, synthetic construct
  misc_feature 1..24: note = Targeting domain
  source 1..24: mol_type = other RNA
tagagaaaaactggaatgactgaa

SEQ ID NO: 601 - RNA, 18 nt, synthetic construct
  misc_feature 1..18: note = Targeting domain
  source 1..18: mol_type = other RNA
gctagggatgaagaataa

SEQ ID NO: 602 - RNA, 19 nt, synthetic construct
  misc_feature 1..19: note = Targeting domain
  source 1..19: mol_type = other RNA
ggctagggatgaagaataa

SEQ ID NO: 603 - RNA, 20 nt, synthetic construct
  misc_feature 1..20: note = Targeting domain
  source 1..20: mol_type = other RNA
tggctagggatgaagaataa

SEQ ID NO: 604 - RNA, 21 nt, synthetic construct
  misc_feature 1..21: note = Targeting domain
  source 1..21: mol_type = other RNA
ctggctagggatgaagaataa

SEQ ID NO: 605 - RNA, 22 nt, synthetic construct
  misc_feature 1..22: note = Targeting domain
  source 1..22: mol_type = other RNA
gctggctagggatgaagaataa

SEQ ID NO: 606 - RNA, 23 nt, synthetic construct
  misc_feature 1..23: note = Targeting domain
  source 1..23: mol_type = other RNA
ggctggctagggatgaagaataa

SEQ ID NO: 607 - RNA, 24 nt, synthetic construct
  misc_feature 1..24: note = Targeting domain
  source 1..24: mol_type = other RNA
cggctggctagggatgaagaataa

SEQ ID NO: 608 - RNA, 18 nt, synthetic construct
  misc_feature 1..18: note = Targeting domain
  source 1..18: mol_type = other RNA
gagaaggaaactagctaa

SEQ ID NO: 609 - RNA, 19 nt, synthetic construct
  misc_feature 1..19: note = Targeting domain
  source 1..19: mol_type = other RNA
ggagaaggaaactagctaa

SEQ ID NO: 610 - RNA, 21 nt, synthetic construct
  misc_feature 1..21: note = Targeting domain
  source 1..21: mol_type = other RNA
tgggagaaggaaactagctaa

SEQ ID NO: 611 - RNA, 22 nt, synthetic construct
  misc_feature 1..22: note = Targeting domain
  source 1..22: mol_type = other RNA
atgggagaaggaaactagctaa

SEQ ID NO: 612 - RNA, 23 nt, synthetic construct
  misc_feature 1..23: note = Targeting domain
  source 1..23: mol_type = other RNA
gatgggagaaggaaactagctaa

SEQ ID NO: 613 - RNA, 24 nt, synthetic construct
  misc_feature 1..24: note = Targeting domain
  source 1..24: mol_type = other RNA
tgatgggagaaggaaactagctaa

SEQ ID NO: 614 - RNA, 18 nt, synthetic construct
  misc_feature 1..18: note = Targeting domain
  source 1..18: mol_type = other RNA
atagtcttagagtatcca

SEQ ID NO: 615 - RNA, 19 nt, synthetic construct
  misc_feature 1..19: note = Targeting domain
  source 1..19: mol_type = other RNA
aatagtcttagagtatcca

SEQ ID NO: 616 - RNA, 20 nt, synthetic construct
  misc_feature 1..20: note = Targeting domain
  source 1..20: mol_type = other RNA
caatagtcttagagtatcca

SEQ ID NO: 617 - RNA, 21 nt, synthetic construct
  misc_feature 1..21: note = Targeting domain
  source 1..21: mol_type = other RNA
ccaatagtcttagagtatcca

SEQ ID NO: 618 - RNA, 22 nt, synthetic construct
  misc_feature 1..22: note = Targeting domain
  source 1..22: mol_type = other RNA
accaatagtcttagagtatcca

SEQ ID NO: 619 - RNA, 23 nt, synthetic construct
  misc_feature 1..23: note = Targeting domain
  source 1..23: mol_type = other RNA
gaccaatagtcttagagtatcca

SEQ ID NO: 620 - RNA, 24 nt, synthetic construct
  misc_feature 1..24: note = Targeting domain
  source 1..24: mol_type = other RNA
tgaccaatagtcttagagtatcca

SEQ ID NO: 621 - RNA, 18 nt, synthetic construct
  misc_feature 1..18: note = Targeting domain
  source 1..18: mol_type = other RNA
atcctctatgatgggaga

SEQ ID NO: 622 - RNA, 19 nt, synthetic construct
  misc_feature 1..19: note = Targeting domain
  source 1..19: mol_type = other RNA
tatcctctatgatgggaga

SEQ ID NO: 623 - RNA, 21 nt, synthetic construct
  misc_feature 1..21: note = Targeting domain
  source 1..21: mol_type = other RNA
ggtatcctctatgatgggaga

SEQ ID NO: 624 - RNA, 22 nt, synthetic construct
  misc_feature 1..22: note = Targeting domain
  source 1..22: mol_type = other RNA
tggtatcctctatgatgggaga

SEQ ID NO: 625 - RNA, 23 nt, synthetic construct
  misc_feature 1..23: note = Targeting domain
  source 1..23: mol_type = other RNA
ctggtatcctctatgatgggaga

SEQ ID NO: 626 - RNA, 24 nt, synthetic construct
  misc_feature 1..24: note = Targeting domain
  source 1..24: mol_type = other RNA
cctggtatcctctatgatgggaga

SEQ ID NO: 627 - RNA, 18 nt, synthetic construct
  misc_feature 1..18: note = Targeting domain
  source 1..18: mol_type = other RNA
tcctggtatcctctatga

SEQ ID NO: 628 - RNA, 19 nt, synthetic construct
  misc_feature 1..19: note = Targeting domain
  source 1..19: mol_type = other RNA
gtcctggtatcctctatga

SEQ ID NO: 629 - RNA, 21 nt, synthetic construct
  misc_feature 1..21: note = Targeting domain
  source 1..21: mol_type = other RNA
aagtcctggtatcctctatga

SEQ ID NO: 630 - RNA, 22 nt, synthetic construct
  misc_feature 1..22: note = Targeting domain
  source 1..22: mol_type = other RNA
gaagtcctggtatcctctatga

SEQ ID NO: 631 - RNA, 23 nt, synthetic construct
  misc_feature 1..23: note = Targeting domain
  source 1..23: mol_type = other RNA
agaagtcctggtatcctctatga

SEQ ID NO: 632 - RNA, 24 nt, synthetic construct
  misc_feature 1..24: note = Targeting domain
  source 1..24: mol_type = other RNA
aagaagtcctggtatcctctatga

SEQ ID NO: 633 - RNA, 18 nt, synthetic construct
  misc_feature 1..18: note = Targeting domain
  source 1..18: mol_type = other RNA
ggagaaggaaactagcta

SEQ ID NO: 634 - RNA, 19 nt, synthetic construct
  misc_feature 1..19: note = Targeting domain
  source 1..19: mol_type = other RNA
gggagaaggaaactagcta

SEQ ID NO: 635 - RNA, 20 nt, synthetic construct
  misc_feature 1..20: note = Targeting domain
  source 1..20: mol_type = other RNA
tgggagaaggaaactagcta

SEQ ID NO: 636 - RNA, 21 nt, synthetic construct
  misc_feature 1..21: note = Targeting domain
  source 1..21: mol_type = other RNA
atgggagaaggaaactagcta

SEQ ID NO: 637 - RNA, 22 nt, synthetic construct
  misc_feature 1..22: note = Targeting domain
  source 1..22: mol_type = other RNA
gatgggagaaggaaactagcta

SEQ ID NO: 638 - RNA, 23 nt, synthetic construct
  misc_feature 1..23: note = Targeting domain
  source 1..23: mol_type = other RNA
tgatgggagaaggaaactagcta

SEQ ID NO: 639 - RNA, 24 nt, synthetic construct
  misc_feature 1..24: note = Targeting domain
  source 1..24: mol_type = other RNA
atgatgggagaaggaaactagcta

SEQ ID NO: 640 - RNA, 18 nt, synthetic construct
  misc_feature 1..18: note = Targeting domain
  source 1..18: mol_type = other RNA
aaagggaagaataaatta

SEQ ID NO: 641 - RNA, 19 nt, synthetic construct
  misc_feature 1..19: note = Targeting domain
  source 1..19: mol_type = other RNA
taaagggaagaataaatta

SEQ ID NO: 642 - RNA, 20 nt, synthetic construct
  misc_feature 1..20: note = Targeting domain
  source 1..20: mol_type = other RNA
ctaaagggaagaataaatta

SEQ ID NO: 643 - RNA, 21 nt, synthetic construct
  misc_feature 1..21: note = Targeting domain
  source 1..21: mol_type = other RNA
gctaaagggaagaataaatta

SEQ ID NO: 644 - RNA, 22 nt, synthetic construct
  misc_feature 1..22: note = Targeting domain
  source 1..22: mol_type = other RNA
agctaaagggaagaataaatta

SEQ ID NO: 645 - RNA, 23 nt, synthetic construct
  misc_feature 1..23: note = Targeting domain
  source 1..23: mol_type = other RNA
tagctaaagggaagaataaatta

SEQ ID NO: 646 - RNA, 24 nt, synthetic construct
  misc_feature 1..24: note = Targeting domain
  source 1..24: mol_type = other RNA
ctagctaaagggaagaataaatta

SEQ ID NO: 647 - RNA, 18 nt, synthetic construct
  misc_feature 1..18: note = Targeting domain
  source 1..18: mol_type = other RNA
agagtatccagtgaggcc

SEQ ID NO: 648 - RNA, 19 nt, synthetic construct
  misc_feature 1..19: note = Targeting domain
  source 1..19: mol_type = other RNA
tagagtatccagtgaggcc

SEQ ID NO: 649 - RNA, 21 nt, synthetic construct
  misc_feature 1..21: note = Targeting domain
  source 1..21: mol_type = other RNA
cttagagtatccagtgaggcc

SEQ ID NO: 650 - RNA, 22 nt, synthetic construct
  misc_feature 1..22: note = Targeting domain
  source 1..22: mol_type = other RNA
tcttagagtatccagtgaggcc

SEQ ID NO: 651 - RNA, 23 nt, synthetic construct
  misc_feature 1..23: note = Targeting domain
  source 1..23: mol_type = other RNA
gtcttagagtatccagtgaggcc

SEQ ID NO: 652 - RNA, 24 nt, synthetic construct
  misc_feature 1..24: note = Targeting domain
  source 1..24: mol_type = other RNA
agtcttagagtatccagtgaggcc

SEQ ID NO: 653 - RNA, 18 nt, synthetic construct
  misc_feature 1..18: note = Targeting domain
  source 1..18: mol_type = other RNA
tagagtatccagtgaggc

SEQ ID NO: 654 - RNA, 19 nt, synthetic construct
  misc_feature 1..19: note = Targeting domain
  source 1..19: mol_type = other RNA
ttagagtatccagtgaggc

SEQ ID NO: 655 - RNA, 20 nt, synthetic construct
  misc_feature 1..20: note = Targeting domain
  source 1..20: mol_type = other RNA
cttagagtatccagtgaggc

SEQ ID NO: 656 - RNA, 21 nt, synthetic construct
  misc_feature 1..21: note = Targeting domain
  source 1..21: mol_type = other RNA
tcttagagtatccagtgaggc

SEQ ID NO: 657 - RNA, 22 nt, synthetic construct
  misc_feature 1..22: note = Targeting domain
  source 1..22: mol_type = other RNA
gtcttagagtatccagtgaggc

SEQ ID NO: 658 - RNA, 23 nt, synthetic construct
  misc_feature 1..23: note = Targeting domain
  source 1..23: mol_type = other RNA
agtcttagagtatccagtgaggc

SEQ ID NO: 659 - RNA, 24 nt, synthetic construct
  misc_feature 1..24: note = Targeting domain
  source 1..24: mol_type = other RNA
tagtcttagagtatccagtgaggc

SEQ ID NO: 660 - RNA, 18 nt, synthetic construct
  misc_feature 1..18: note = Targeting domain
  source 1..18: mol_type = other RNA
caggggccggcggctggc

SEQ ID NO: 661 - RNA, 19 nt, synthetic construct
  misc_feature 1..19: note = Targeting domain
  source 1..19: mol_type = other RNA
ccaggggccggcggctggc

SEQ ID NO: 662 - RNA, 20 nt, synthetic construct
  misc_feature 1..20: note = Targeting domain
  source 1..20: mol_type = other RNA
gccaggggccggcggctggc

SEQ ID NO: 663 - RNA, 21 nt, synthetic construct
  misc_feature 1..21: note = Targeting domain
  source 1..21: mol_type = other RNA
ggccaggggccggcggctggc

SEQ ID NO: 664 - RNA, 22 nt, synthetic construct
  misc_feature 1..22: note = Targeting domain
  source 1..22: mol_type = other RNA
aggccaggggccggcggctggc

SEQ ID NO: 665 - RNA, 23 nt, synthetic construct
  misc_feature 1..23: note = Targeting domain
  source 1..23: mol_type = other RNA
gaggccaggggccggcggctggc

SEQ ID NO: 666 - RNA, 24 nt, synthetic construct
  misc_feature 1..24: note = Targeting domain
  source 1..24: mol_type = other RNA
tgaggccaggggccggcggctggc

SEQ ID NO: 667 - RNA, 18 nt, synthetic construct
  misc_feature 1..18: note = Targeting domain
  source 1..18: mol_type = other RNA
aaaattagcagtatcctc

SEQ ID NO: 668 - RNA, 19 nt, synthetic construct
  misc_feature 1..19: note = Targeting domain
  source 1..19: mol_type = other RNA
aaaaattagcagtatcctc

SEQ ID NO: 669 - RNA, 20 nt, synthetic construct
  misc_feature 1..20: note = Targeting domain
  source 1..20: mol_type = other RNA
aaaaaattagcagtatcctc

SEQ ID NO: 670 - RNA, 21 nt, synthetic construct
  misc_feature 1..21: note = Targeting domain
  source 1..21: mol_type = other RNA
aaaaaaattagcagtatcctc

SEQ ID NO: 671 - RNA, 22 nt, synthetic construct
  misc_feature 1..22: note = Targeting domain
  source 1..22: mol_type = other RNA
aaaaaaaattagcagtatcctc

SEQ ID NO: 672 - RNA, 23 nt, synthetic construct
  misc_feature 1..23: note = Targeting domain
  source 1..23: mol_type = other RNA
taaaaaaaattagcagtatcctc

SEQ ID NO: 673 - RNA, 24 nt, synthetic construct
  misc_feature 1..24: note = Targeting domain
  source 1..24: mol_type = other RNA
ataaaaaaaattagcagtatcctc

SEQ ID NO: 674 - RNA, 18 nt, synthetic construct
  misc_feature 1..18: note = Targeting domain
  source 1..18: mol_type = other RNA
gttccacacactcgcttc

SEQ ID NO: 675 - RNA, 19 nt, synthetic construct
  misc_feature 1..19: note = Targeting domain
  source 1..19: mol_type = other RNA
agttccacacactcgcttc

SEQ ID NO: 676 - RNA, 21 nt, synthetic construct
  misc_feature 1..21: note = Targeting domain
  source 1..21: mol_type = other RNA
gcagttccacacactcgcttc

SEQ ID NO: 677 - RNA, 22 nt, synthetic construct
  misc_feature 1..22: note = Targeting domain
  source 1..22: mol_type = other RNA
agcagttccacacactcgcttc

SEQ ID NO: 678 - RNA, 23 nt, synthetic construct
  misc_feature 1..23: note = Targeting domain
  source 1..23: mol_type = other RNA
cagcagttccacacactcgcttc

SEQ ID NO: 679 - RNA, 24 nt, synthetic construct
  misc_feature 1..24: note = Targeting domain
  source 1..24: mol_type = other RNA
tcagcagttccacacactcgcttc

SEQ ID NO: 680 - RNA, 18 nt, synthetic construct
  misc_feature 1..18: note = Targeting domain
  source 1..18: mol_type = other RNA
tatcctctatgatgggag

SEQ ID NO: 681 - RNA, 19 nt, synthetic construct
  misc_feature 1..19: note = Targeting domain
  source 1..19: mol_type = other RNA
gtatcctctatgatgggag

SEQ ID NO: 682 - RNA, 20 nt, synthetic construct
  misc_feature 1..20: note = Targeting domain
  source 1..20: mol_type = other RNA
ggtatcctctatgatgggag

SEQ ID NO: 683 - RNA, 21 nt, synthetic construct
  misc_feature 1..21: note = Targeting domain
  source 1..21: mol_type = other RNA
tggtatcctctatgatgggag

SEQ ID NO: 684 - RNA, 22 nt, synthetic construct
  misc_feature 1..22: note = Targeting domain
  source 1..22: mol_type = other RNA
ctggtatcctctatgatgggag

SEQ ID NO: 685 - RNA, 23 nt, synthetic construct
  misc_feature 1..23: note = Targeting domain
  source 1..23: mol_type = other RNA
cctggtatcctctatgatgggag

SEQ ID NO: 686 - RNA, 24 nt, synthetic construct
  misc_feature 1..24: note = Targeting domain
  source 1..24: mol_type = other RNA
tcctggtatcctctatgatgggag

SEQ ID NO: 687 - RNA, 18 nt, synthetic construct
  misc_feature 1..18: note = Targeting domain
  source 1..18: mol_type = other RNA
gccggcggctggctaggg

SEQ ID NO: 688 - RNA, 19 nt, synthetic construct
  misc_feature 1..19: note = Targeting domain
  source 1..19: mol_type = other RNA
ggccggcggctggctaggg

SEQ ID NO: 689 - RNA, 20 nt, synthetic construct
  misc_feature 1..20: note = Targeting domain
  source 1..20: mol_type = other RNA
gggccggcggctggctaggg

SEQ ID NO: 690 - RNA, 21 nt, synthetic construct
  misc_feature 1..21: note = Targeting domain
  source 1..21: mol_type = other RNA
ggggccggcggctggctaggg

SEQ ID NO: 691 - RNA, 22 nt, synthetic construct
  misc_feature 1..22: note = Targeting domain
  source 1..22: mol_type = other RNA
aggggccggcggctggctaggg

SEQ ID NO: 692 - RNA, 23 nt, synthetic construct
  misc_feature 1..23: note = Targeting domain
  source 1..23: mol_type = other RNA
caggggccggcggctggctaggg

SEQ ID NO: 693 - RNA, 24 nt, synthetic construct
  misc_feature 1..24: note = Targeting domain
  source 1..24: mol_type = other RNA
ccaggggccggcggctggctaggg

SEQ ID NO: 694 - RNA, 18 nt, synthetic construct
  misc_feature 1..18: note = Targeting domain
  source 1..18: mol_type = other RNA
tggtatcctctatgatgg

SEQ ID NO: 695 - RNA, 19 nt, synthetic construct
  misc_feature 1..19: note = Targeting domain
  source 1..19: mol_type = other RNA
ctggtatcctctatgatgg

SEQ ID NO: 696 - RNA, 20 nt, synthetic construct
  misc_feature 1..20: note = Targeting domain
  source 1..20: mol_type = other RNA
cctggtatcctctatgatgg

SEQ ID NO: 697 - RNA, 21 nt, synthetic construct
  misc_feature 1..21: note = Targeting domain
  source 1..21: mol_type = other RNA
tcctggtatcctctatgatgg

SEQ ID NO: 698 - RNA, 22 nt, synthetic construct
  misc_feature 1..22: note = Targeting domain
  source 1..22: mol_type = other RNA
gtcctggtatcctctatgatgg

SEQ ID NO: 699 - RNA, 23 nt, synthetic construct
  misc_feature 1..23: note = Targeting domain
  source 1..23: mol_type = other RNA
agtcctggtatcctctatgatgg

SEQ ID NO: 700 - RNA, 24 nt, synthetic construct
  misc_feature 1..24: note = Targeting domain
  source 1..24: mol_type = other RNA
aagtcctggtatcctctatgatgg

SEQ ID NO: 701 - RNA, 18 nt, synthetic construct
  misc_feature 1..18: note = Targeting domain
  source 1..18: mol_type = other RNA
gtcctggtatcctctatg

SEQ ID NO: 702 - RNA, 19 nt, synthetic construct
  misc_feature 1..19: note = Targeting domain
  source 1..19: mol_type = other RNA
agtcctggtatcctctatg

SEQ ID NO: 703 - RNA, 20 nt, synthetic construct
  misc_feature 1..20: note = Targeting domain
  source 1..20: mol_type = other RNA
aagtcctggtatcctctatg

SEQ ID NO: 704 - RNA, 21 nt, synthetic construct
  misc_feature 1..21: note = Targeting domain
  source 1..21: mol_type = other RNA
gaagtcctggtatcctctatg

SEQ ID NO: 705 - RNA, 22 nt, synthetic construct
  misc_feature 1..22: note = Targeting domain
  source 1..22: mol_type = other RNA
agaagtcctggtatcctctatg

SEQ ID NO: 706 - RNA, 23 nt, synthetic construct
  misc_feature 1..23: note = Targeting domain
  source 1..23: mol_type = other RNA
aagaagtcctggtatcctctatg

SEQ ID NO: 707 - RNA, 24 nt, synthetic construct
  misc_feature 1..24: note = Targeting domain
  source 1..24: mol_type = other RNA
aaagaagtcctggtatcctctatg

SEQ ID NO: 708 - RNA, 18 nt, synthetic construct
  misc_feature 1..18: note = Targeting domain
  source 1..18: mol_type = other RNA
ctaaagggaagaataaat

SEQ ID NO: 709 - RNA, 19 nt, synthetic construct
  misc_feature 1..19: note = Targeting domain
  source 1..19: mol_type = other RNA
gctaaagggaagaataaat

SEQ ID NO: 710 - RNA, 20 nt, synthetic construct
  misc_feature 1..20: note = Targeting domain
  source 1..20: mol_type = other RNA
agctaaagggaagaataaat

SEQ ID NO: 711 - RNA, 21 nt, synthetic construct
  misc_feature 1..21: note = Targeting domain
  source 1..21: mol_type = other RNA
tagctaaagggaagaataaat

SEQ ID NO: 712 - RNA, 22 nt, synthetic construct
  misc_feature 1..22: note = Targeting domain
  source 1..22: mol_type = other RNA
ctagctaaagggaagaataaat

SEQ ID NO: 713 - RNA, 23 nt, synthetic construct
  misc_feature 1..23: note = Targeting domain
  source 1..23: mol_type = other RNA
actagctaaagggaagaataaat

SEQ ID NO: 714 - RNA, 24 nt, synthetic construct
  misc_feature 1..24: note = Targeting domain
  source 1..24: mol_type = other RNA
aactagctaaagggaagaataaat

SEQ ID NO: 715 - RNA, 18 nt, synthetic construct
  misc_feature 1..18: note = Targeting domain
  source 1..18: mol_type = other RNA
aaactggaatgactgaat

SEQ ID NO: 716 - RNA, 19 nt, synthetic construct
  misc_feature 1..19: note = Targeting domain
  source 1..19: mol_type = other RNA
aaaactggaatgactgaat

SEQ ID NO: 717 - RNA, 21 nt, synthetic construct
  misc_feature 1..21: note = Targeting domain
  source 1..21: mol_type = other RNA
gaaaaactggaatgactgaat

SEQ ID NO: 718 - RNA, 22 nt, synthetic construct
  misc_feature 1..22: note = Targeting domain
  source 1..22: mol_type = other RNA
agaaaaactggaatgactgaat

SEQ ID NO: 719 - RNA, 23 nt, synthetic construct
  misc_feature 1..23: note = Targeting domain
  source 1..23: mol_type = other RNA
gagaaaaactggaatgactgaat

SEQ ID NO: 720 - RNA, 24 nt, synthetic construct
  misc_feature 1..24: note = Targeting domain
  source 1..24: mol_type = other RNA
agagaaaaactggaatgactgaat

SEQ ID NO: 721 - RNA, 18 nt, synthetic construct
  misc_feature 1..18: note = Targeting domain
  source 1..18: mol_type = other RNA
cctggtatcctctatgat

SEQ ID NO: 722 - RNA, 19 nt, synthetic construct
  misc_feature 1..19: note = Targeting domain
  source 1..19: mol_type = other RNA
tcctggtatcctctatgat

SEQ ID NO: 723 - RNA, 21 nt, synthetic construct
  misc_feature 1..21: note = Targeting domain
  source 1..21: mol_type = other RNA
agtcctggtatcctctatgat

SEQ ID NO: 724 - RNA, 22 nt, synthetic construct
  misc_feature 1..22: note = Targeting domain
  source 1..22: mol_type = other RNA
aagtcctggtatcctctatgat

SEQ ID NO: 725 - RNA, 23 nt, synthetic construct
  misc_feature 1..23: note = Targeting domain
  source 1..23: mol_type = other RNA
gaagtcctggtatcctctatgat

SEQ ID NO: 726 - RNA, 24 nt, synthetic construct
  misc_feature 1..24: note = Targeting domain
  source 1..24: mol_type = other RNA
agaagtcctggtatcctctatgat

SEQ ID NO: 727 - RNA, 18 nt, synthetic construct
  misc_feature 1..18: note = Targeting domain
  source 1..18: mol_type = other RNA
aaattagcagtatcctct

SEQ ID NO: 728 - RNA, 19 nt, synthetic construct
  misc_feature 1..19: note = Targeting domain
  source 1..19: mol_type = other RNA
aaaattagcagtatcctct

SEQ ID NO: 729 - RNA, 21 nt, synthetic construct
  misc_feature 1..21: note = Targeting domain
  source 1..21: mol_type = other RNA
aaaaaattagcagtatcctct

SEQ ID NO: 730 - RNA, 22 nt, synthetic construct
  misc_feature 1..22: note = Targeting domain
  source 1..22: mol_type = other RNA
aaaaaaattagcagtatcctct

SEQ ID NO: 731 - RNA, 23 nt, synthetic construct
  misc_feature 1..23: note = Targeting domain
  source 1..23: mol_type = other RNA
aaaaaaaattagcagtatcctct

SEQ ID NO: 732 - RNA, 24 nt, synthetic construct
  misc_feature 1..24: note = Targeting domain
  source 1..24: mol_type = other RNA
taaaaaaaattagcagtatcctct

SEQ ID NO: 733 - RNA, 18 nt, synthetic construct
  misc_feature 1..18: note = Targeting domain
  source 1..18: mol_type = other RNA
cactcgcttctggaacgt

SEQ ID NO: 734 - RNA, 19 nt, synthetic construct
  misc_feature 1..19: note = Targeting domain
  source 1..19: mol_type = other RNA
acactcgcttctggaacgt

SEQ ID NO: 735 - RNA, 20 nt, synthetic construct
  misc_feature 1..20: note = Targeting domain
  source 1..20: mol_type = other RNA
cacactcgcttctggaacgt

SEQ ID NO: 736 - RNA, 21 nt, synthetic construct
  misc_feature 1..21: note = Targeting domain
  source 1..21: mol_type = other RNA
acacactcgcttctggaacgt

SEQ ID NO: 737 - RNA, 22 nt, synthetic construct
  misc_feature 1..22: note = Targeting domain
  source 1..22: mol_type = other RNA
cacacactcgcttctggaacgt

SEQ ID NO: 738 - RNA, 23 nt, synthetic construct
  misc_feature 1..23: note = Targeting domain
  source 1..23: mol_type = other RNA
ccacacactcgcttctggaacgt

SEQ ID NO: 739 - RNA, 24 nt, synthetic construct
  misc_feature 1..24: note = Targeting domain
  source 1..24: mol_type = other RNA
tccacacactcgcttctggaacgt

SEQ ID NO: 740 - RNA, 18 nt, synthetic construct
  misc_feature 1..18: note = Targeting domain
  source 1..18: mol_type = other RNA
ctcaatgcaaatatctgt

SEQ ID NO: 741 - RNA, 19 nt, synthetic construct
  misc_feature 1..19: note = Targeting domain
  source 1..19: mol_type = other RNA
tctcaatgcaaatatctgt

SEQ ID NO: 742 - RNA, 20 nt, synthetic construct
  misc_feature 1..20: note = Targeting domain
  source 1..20: mol_type = other RNA
atctcaatgcaaatatctgt

SEQ ID NO: 743 - RNA, 21 nt, synthetic construct
  misc_feature 1..21: note = Targeting domain
  source 1..21: mol_type = other RNA
tatctcaatgcaaatatctgt

SEQ ID NO: 744 - RNA, 22 nt, synthetic construct
  misc_feature 1..22: note = Targeting domain
  source 1..22: mol_type = other RNA
ctatctcaatgcaaatatctgt

SEQ ID NO: 745 - RNA, 23 nt, synthetic construct
  misc_feature 1..23: note = Targeting domain
  source 1..23: mol_type = other RNA
actatctcaatgcaaatatctgt

SEQ ID NO: 746 - RNA, 24 nt, synthetic construct
  misc_feature 1..24: note = Targeting domain
  source 1..24: mol_type = other RNA
cactatctcaatgcaaatatctgt

SEQ ID NO: 747 - RNA, 18 nt, synthetic construct
  misc_feature 1..18: note = Targeting domain
  source 1..18: mol_type = other RNA
agttccacacactcgctt

SEQ ID NO: 748 - RNA, 19 nt, synthetic construct
  misc_feature 1..19: note = Targeting domain
  source 1..19: mol_type = other RNA
cagttccacacactcgctt

SEQ ID NO: 749 - RNA, 20 nt, synthetic construct
  misc_feature 1..20: note = Targeting domain
  source 1..20: mol_type = other RNA
gcagttccacacactcgctt

SEQ ID NO: 750 - RNA, 21 nt, synthetic construct
  misc_feature 1..21: note = Targeting domain
  source 1..21: mol_type = other RNA
agcagttccacacactcgctt

SEQ ID NO: 751 - RNA, 22 nt, synthetic construct
  misc_feature 1..22: note = Targeting domain
  source 1..22: mol_type = other RNA
cagcagttccacacactcgctt

SEQ ID NO: 752 - RNA, 23 nt, synthetic construct
  misc_feature 1..23: note = Targeting domain
  source 1..23: mol_type = other RNA
tcagcagttccacacactcgctt

SEQ ID NO: 753 - RNA, 24 nt, synthetic construct
  misc_feature 1..24: note = Targeting domain
  source 1..24: mol_type = other RNA
ttcagcagttccacacactcgctt

SEQ ID NO: 754 - RNA, 18 nt, synthetic construct
  misc_feature 1..18: note = Targeting domain
  source 1..18: mol_type = other RNA
aattagcagtatcctctt

SEQ ID NO: 755 - RNA, 19 nt, synthetic construct
  misc_feature 1..19: note = Targeting domain
  source 1..19: mol_type = other RNA
aaattagcagtatcctctt

SEQ ID NO: 756 - RNA, 21 nt, synthetic construct
  misc_feature 1..21: note = Targeting domain
  source 1..21: mol_type = other RNA
aaaaattagcagtatcctctt

SEQ ID NO: 757 - RNA, 22 nt, synthetic construct
  misc_feature 1..22: note = Targeting domain
  source 1..22: mol_type = other RNA
aaaaaattagcagtatcctctt

SEQ ID NO: 758 - RNA, 23 nt, synthetic construct
  misc_feature 1..23: note = Targeting domain
  source 1..23: mol_type = other RNA
aaaaaaattagcagtatcctctt

SEQ ID NO: 759 - RNA, 24 nt, synthetic construct
  misc_feature 1..24: note = Targeting domain
  source 1..24: mol_type = other RNA
aaaaaaaattagcagtatcctctt

SEQ ID NO: 760 - RNA, 17 nt, synthetic construct
  misc_feature 1..17: note = Targeting domain
  source 1..17: mol_type = other RNA
gaagaaaactagctaaa

SEQ ID NO: 761 - RNA, 17 nt, synthetic construct
  misc_feature 1..17: note = Targeting domain
  source 1..17: mol_type = other RNA
gcagcagtatcctcttg

SEQ ID NO: 762 - RNA, 20 nt, synthetic construct
  misc_feature 1..20: note = Targeting domain
  source 1..20: mol_type = other RNA
ggagaagaaaactagctaaa

SEQ ID NO: 763 - RNA, 20 nt, synthetic construct
  misc_feature 1..20: note = Targeting domain
  source 1..20: mol_type = other RNA
gggagaagaaaactagctaa

SEQ ID NO: 764 - RNA, 20 nt, synthetic construct
  misc_feature 1..20: note = Targeting domain
  source 1..20: mol_type = other RNA
gtcctggtatcttctatggt

SEQ ID NO: 765 - RNA, 17 nt, synthetic construct
  misc_feature 1..17: note = Targeting domain
  source 1..17: mol_type = other RNA
agaagaaaactagctaa

SEQ ID NO: 766 - RNA, 17 nt, synthetic construct
  misc_feature 1..17: note = Targeting domain
  source 1..17: mol_type = other RNA
agtcctggtatcttcta

SEQ ID NO: 767 - RNA, 17 nt, synthetic construct
  misc_feature 1..17: note = Targeting domain
  source 1..17: mol_type = other RNA
ccaccatagaagatacc

SEQ ID NO: 768 - RNA, 17 nt, synthetic construct
  misc_feature 1..17: note = Targeting domain
  source 1..17: mol_type = other RNA
cctggtatcttctatgg

SEQ ID NO: 769 - RNA, 17 nt, synthetic construct
  misc_feature 1..17: note = Targeting domain
  source 1..17: mol_type = other RNA
cagcagtatcctcttgg

SEQ ID NO: 770 - RNA, 17 nt, synthetic construct
  misc_feature 1..17: note = Targeting domain
  source 1..17: mol_type = other RNA
aattggaatgactgaat

SEQ ID NO: 771 - RNA, 17 nt, synthetic construct
  misc_feature 1..17: note = Targeting domain
  source 1..17: mol_type = other RNA
ctggtatcttctatggt

SEQ ID NO: 772 - RNA, 17 nt, synthetic construct
  misc_feature 1..17: note = Targeting domain
  source 1..17: mol_type = other RNA
agcagcagtatcctctt

SEQ ID NO: 773 - RNA, 20 nt, synthetic construct
  misc_feature 1..20: note = Targeting domain
  source 1..20: mol_type = other RNA
agaagtcctggtatcttcta

SEQ ID NO: 774 - RNA, 20 nt, synthetic construct
  misc_feature 1..20: note = Targeting domain
  source 1..20: mol_type = other RNA
ctcccaccatagaagatacc

SEQ ID NO: 775 - RNA, 20 nt, synthetic construct
  misc_feature 1..20: note = Targeting domain
  source 1..20: mol_type = other RNA
agtcctggtatcttctatgg

SEQ ID NO: 776 - RNA, 20 nt, synthetic construct
  misc_feature 1..20: note = Targeting domain
  source 1..20: mol_type = other RNA
aagcagcagtatcctcttgg

SEQ ID NO: 777 - RNA, 20 nt, synthetic construct
  misc_feature 1..20: note = Targeting domain
  source 1..20: mol_type = other RNA
taagcagcagtatcctcttg

SEQ ID NO: 778 - RNA, 20 nt, synthetic construct
  misc_feature 1..20: note = Targeting domain
  source 1..20: mol_type = other RNA
agaataaattagagaaaaat

SEQ ID NO: 779 - RNA, 20 nt, synthetic construct
  misc_feature 1..20: note = Targeting domain
  source 1..20: mol_type = other RNA
aaaaattggaatgactgaat

SEQ ID NO: 780 - RNA, 20 nt, synthetic construct
  misc_feature 1..20: note = Targeting domain
  source 1..20: mol_type = other RNA
attaagcagcagtatcctct

SEQ ID NO: 781 - RNA, 20 nt, synthetic construct
  misc_feature 1..20: note = Targeting domain
  source 1..20: mol_type = other RNA
ttaagcagcagtatcctctt

SEQ ID NO: 782 - RNA, 17 nt, synthetic construct
  misc_feature 1..17: note = Targeting domain
  source 1..17: mol_type = other RNA
ataaattagagaaaaat

SEQ ID NO: 783 - RNA, 17 nt, synthetic construct
  misc_feature 1..17: note = Targeting domain
  source 1..17: mol_type = other RNA
aagcagcagtatcctct

SEQ ID NO: 784 - RNA, 20 nt, synthetic construct
  misc_feature 1..20: note = Targeting domain
  source 1..20: mol_type = other RNA
gaagaaaactagctaaaggg

SEQ ID NO: 785 - RNA, 22 nt, synthetic construct
  misc_feature 1..22: note = Targeting domain
  source 1..22: mol_type = other RNA
gagaagaaaactagctaaaggg

SEQ ID NO: 786 - RNA, 23 nt, synthetic construct
  misc_feature 1..23: note = Targeting domain
  source 1..23: mol_type = other RNA
ggagaagaaaactagctaaaggg

SEQ ID NO: 787 - RNA, 24 nt, synthetic construct
  misc_feature 1..24: note = Targeting domain
  source 1..24: mol_type = other RNA
gggagaagaaaactagctaaaggg

SEQ ID NO: 788 - RNA, 19 nt, synthetic construct
  misc_feature 1..19: note = Targeting domain
  source 1..19: mol_type = other RNA
gaataaattagagaaaaat

SEQ ID NO: 789 - RNA, 22 nt, synthetic construct
  misc_feature 1..22: note = Targeting domain
  source 1..22: mol_type = other RNA
gaagaataaattagagaaaaat

SEQ ID NO: 790 - RNA, 23 nt, synthetic construct
  misc_feature 1..23: note = Targeting domain
  source 1..23: mol_type = other RNA
ggaagaataaattagagaaaaat

SEQ ID NO: 791 - RNA, 24 nt, synthetic construct
  misc_feature 1..24: note = Targeting domain
  source 1..24: mol_type = other RNA
gggaagaataaattagagaaaaat

SEQ ID NO: 792 - RNA, 18 nt, synthetic construct
  misc_feature 1..18: note = Targeting domain
  source 1..18: mol_type = other RNA
agagaaaaattggaatga

SEQ ID NO: 793 - RNA, 19 nt, synthetic construct
  misc_feature 1..19: note = Targeting domain
  source 1..19: mol_type = other RNA
tagagaaaaattggaatga

SEQ ID NO: 794 - RNA, 20 nt, synthetic construct
  misc_feature 1..20: note = Targeting domain
  source 1..20: mol_type = other RNA
ttagagaaaaattggaatga

SEQ ID NO: 795 - RNA, 21 nt, synthetic construct
  misc_feature 1..21: note = Targeting domain
  source 1..21: mol_type = other RNA
attagagaaaaattggaatga

SEQ ID NO: 796 - RNA, 22 nt, synthetic construct
  misc_feature 1..22: note = Targeting domain
  source 1..22: mol_type = other RNA
aattagagaaaaattggaatga

SEQ ID NO: 797 - RNA, 23 nt, synthetic construct
  misc_feature 1..23: note = Targeting domain
  source 1..23: mol_type = other RNA
aaattagagaaaaattggaatga

SEQ ID NO: 798 - RNA, 24 nt, synthetic construct
  misc_feature 1..24: note = Targeting domain
  source 1..24: mol_type = other RNA
taaattagagaaaaattggaatga

SEQ ID NO: 799 - RNA, 18 nt, synthetic construct
  misc_feature 1..18: note = Targeting domain
  source 1..18: mol_type = other RNA
agaaaactagctaaaggg

SEQ ID NO: 800 - RNA, 19 nt, synthetic construct
  misc_feature 1..19: note = Targeting domain
  source 1..19: mol_type = other RNA
aagaaaactagctaaaggg

SEQ ID NO: 801 - RNA, 21 nt, synthetic construct
  misc_feature 1..21: note = Targeting domain
  source 1..21: mol_type = other RNA
agaagaaaactagctaaaggg

SEQ ID NO: 802 - RNA, 18 nt, synthetic construct
  misc_feature 1..18: note = Targeting domain
  source 1..18: mol_type = other RNA
aataaattagagaaaaat

SEQ ID NO: 803 - RNA, 21 nt, synthetic construct
  misc_feature 1..21: note = Targeting domain
  source 1..21: mol_type = other RNA
aagaataaattagagaaaaat

SEQ ID NO: 804 - RNA, 18 nt, synthetic construct
  misc_feature 1..18: note = Targeting domain
  source 1..18: mol_type = other RNA
agttttcttctcccacca

SEQ ID NO: 805 - RNA, 19 nt, synthetic construct
  misc_feature 1..19: note = Targeting domain
  source 1..19: mol_type = other RNA
tagttttcttctcccacca

SEQ ID NO: 806 - RNA, 20 nt, synthetic construct
  misc_feature 1..20: note = Targeting domain
  source 1..20: mol_type = other RNA
ctagttttcttctcccacca

SEQ ID NO: 807 - RNA, 21 nt, synthetic construct
  misc_feature 1..21: note = Targeting domain
  source 1..21: mol_type = other RNA
gctagttttcttctcccacca

SEQ ID NO: 808 - RNA, 22 nt, synthetic construct
  misc_feature 1..22: note = Targeting domain
  source 1..22: mol_type = other RNA
agctagttttcttctcccacca

SEQ ID NO: 809 - RNA, 23 nt, synthetic construct
  misc_feature 1..23: note = Targeting domain
  source 1..23: mol_type = other RNA
tagctagttttcttctcccacca

SEQ ID NO: 810 - RNA, 24 nt, synthetic construct
  misc_feature 1..24: note = Targeting domain
  source 1..24: mol_type = other RNA
ttagctagttttcttctcccacca

SEQ ID NO: 811 - RNA, 18 nt, synthetic construct
  misc_feature 1..18: note = Targeting domain
  source 1..18: mol_type = other RNA
tcccaccatagaagatac

SEQ ID NO: 812 - RNA, 19 nt, synthetic construct
  misc_feature 1..19: note = Targeting domain
  source 1..19: mol_type = other RNA
ctcccaccatagaagatac

SEQ ID NO: 813 - RNA, 20 nt, synthetic construct
  misc_feature 1..20: note = Targeting domain
  source 1..20: mol_type = other RNA
tctcccaccatagaagatac

SEQ ID NO: 814 - RNA, 21 nt, synthetic construct
  misc_feature 1..21: note = Targeting domain
  source 1..21: mol_type = other RNA
ttctcccaccatagaagatac

SEQ ID NO: 815 - RNA, 22 nt, synthetic construct
  misc_feature 1..22: note = Targeting domain
  source 1..22: mol_type = other RNA
cttctcccaccatagaagatac

SEQ ID NO: 816 - RNA, 23 nt, synthetic construct
  misc_feature 1..23: note = Targeting domain
  source 1..23: mol_type = other RNA
tcttctcccaccatagaagatac

SEQ ID NO: 817 - RNA, 24 nt, synthetic construct
  misc_feature 1..24: note = Targeting domain
  source 1..24: mol_type = other RNA
ttcttctcccaccatagaagatac

SEQ ID NO: 818 - RNA, 18 nt, synthetic construct
  misc_feature 1..18: note = Targeting domain
  source 1..18: mol_type = other RNA
agaagaaaactagctaaa

SEQ ID NO: 819 - RNA, 19 nt, synthetic construct
  misc_feature 1..19: note = Targeting domain
  source 1..19: mol_type = other RNA
gagaagaaaactagctaaa

SEQ ID NO: 820 - RNA, 21 nt, synthetic construct
  misc_feature 1..21: note = Targeting domain
  source 1..21: mol_type = other RNA
gggagaagaaaactagctaaa

SEQ ID NO: 821 - RNA, 22 nt, synthetic construct
  misc_feature 1..22: note = Targeting domain
  source 1..22: mol_type = other RNA
tgggagaagaaaactagctaaa

SEQ ID NO: 822 - RNA, 23 nt, synthetic construct
  misc_feature 1..23: note = Targeting domain
  source 1..23: mol_type = other RNA
gtgggagaagaaaactagctaaa

SEQ ID NO: 823 - RNA, 24 nt, synthetic construct
  misc_feature 1..24: note = Targeting domain
  source 1..24: mol_type = other RNA
ggtgggagaagaaaactagctaaa

SEQ ID NO: 824 - RNA, 18 nt, synthetic construct
  misc_feature 1..18: note = Targeting domain
  source 1..18: mol_type = other RNA
aaaattggaatgactgaa

SEQ ID NO: 825 - RNA, 19 nt, synthetic construct
  misc_feature 1..19: note = Targeting domain
  source 1..19: mol_type = other RNA
aaaaattggaatgactgaa

SEQ ID NO: 826 - RNA, 20 nt, synthetic construct
  misc_feature 1..20: note = Targeting domain
  source 1..20: mol_type = other RNA
gaaaaattggaatgactgaa

SEQ ID NO: 827 - RNA, 21 nt, synthetic construct
  misc_feature 1..21: note = Targeting domain
  source 1..21: mol_type = other RNA
agaaaaattggaatgactgaa

SEQ ID NO: 828 - RNA, 22 nt, synthetic construct
  misc_feature 1..22: note = Targeting domain
  source 1..22: mol_type = other RNA
gagaaaaattggaatgactgaa

SEQ ID NO: 829 - RNA, 23 nt, synthetic construct
  misc_feature 1..23: note = Targeting domain
  source 1..23: mol_type = other RNA
agagaaaaattggaatgactgaa

SEQ ID NO: 830 - RNA, 24 nt, synthetic construct
  misc_feature 1..24: note = Targeting domain
  source 1..24: mol_type = other RNA
tagagaaaaattggaatgactgaa

SEQ ID NO: 831 - RNA, 18 nt, synthetic construct
  misc_feature 1..18: note = Targeting domain
  source 1..18: mol_type = other RNA
gagaagaaaactagctaa

SEQ ID NO: 832 - RNA, 19 nt, synthetic construct
  misc_feature 1..19: note = Targeting domain
  source 1..19: mol_type = other RNA
ggagaagaaaactagctaa

SEQ ID NO: 833 - RNA, 21 nt, synthetic construct
  misc_feature 1..21: note = Targeting domain
  source 1..21: mol_type = other RNA
tgggagaagaaaactagctaa

SEQ ID NO: 834 - RNA, 22 nt, synthetic construct
  misc_feature 1..22: note = Targeting domain
  source 1..22: mol_type = other RNA
gtgggagaagaaaactagctaa

SEQ ID NO: 835 - RNA, 23 nt, synthetic construct
  misc_feature 1..23: note = Targeting domain
  source 1..23: mol_type = other RNA
ggtgggagaagaaaactagctaa

SEQ ID NO: 836 - RNA, 24 nt, synthetic construct
  misc_feature 1..24: note = Targeting domain
  source 1..24: mol_type = other RNA
tggtgggagaagaaaactagctaa

SEQ ID NO: 837 - RNA, 18 nt, synthetic construct
  misc_feature 1..18: note = Targeting domain
  source 1..18: mol_type = other RNA
ggagaagaaaactagcta

SEQ ID NO: 838 - RNA, 19 nt, synthetic construct
  misc_feature 1..19: note = Targeting domain
  source 1..19: mol_type = other RNA
gggagaagaaaactagcta

SEQ ID NO: 839 - RNA, 20 nt, synthetic construct
  misc_feature 1..20: note = Targeting domain
  source 1..20: mol_type = other RNA
tgggagaagaaaactagcta

SEQ ID NO: 840 - RNA, 21 nt, synthetic construct
  misc_feature 1..21: note = Targeting domain
  source 1..21: mol_type = other RNA
gtgggagaagaaaactagcta

SEQ ID NO: 841 - RNA, 22 nt, synthetic construct
  misc_feature 1..22: note = Targeting domain
  source 1..22: mol_type = other RNA
ggtgggagaagaaaactagcta

SEQ ID NO: 842 - RNA, 23 nt, synthetic construct
  misc_feature 1..23: note = Targeting domain
  source 1..23: mol_type = other RNA
tggtgggagaagaaaactagcta

SEQ ID NO: 843 - RNA, 24 nt, synthetic construct
  misc_feature 1..24: note = Targeting domain
  source 1..24: mol_type = other RNA
atggtgggagaagaaaactagcta

SEQ ID NO: 844 - RNA, 18 nt, synthetic construct
  misc_feature 1..18: note = Targeting domain
  source 1..18: mol_type = other RNA
ttaagcagcagtatcctc

SEQ ID NO: 845 - RNA, 19 nt, synthetic construct
  misc_feature 1..19: note = Targeting domain
  source 1..19: mol_type = other RNA
attaagcagcagtatcctc

SEQ ID NO: 846 - RNA, 20 nt, synthetic construct
  misc_feature 1..20: note = Targeting domain
  source 1..20: mol_type = other RNA
aattaagcagcagtatcctc

SEQ ID NO: 847 - RNA, 21 nt, synthetic construct
  misc_feature 1..21: note = Targeting domain
  source 1..21: mol_type = other RNA
aaattaagcagcagtatcctc

SEQ ID NO: 848 - RNA, 22 nt, synthetic construct
  misc_feature 1..22: note = Targeting domain
  source 1..22: mol_type = other RNA
aaaattaagcagcagtatcctc

SEQ ID NO: 849 - RNA, 23 nt, synthetic construct
  misc_feature 1..23: note = Targeting domain
  source 1..23: mol_type = other RNA
aaaaattaagcagcagtatcctc

SEQ ID NO: 850 - RNA, 24 nt, synthetic construct
  misc_feature 1..24: note = Targeting domain
  source 1..24: mol_type = other RNA
aaaaaattaagcagcagtatcctc

SEQ ID NO: 851 - RNA, 18 nt, synthetic construct
  misc_feature 1..18: note = Targeting domain
  source 1..18: mol_type = other RNA
tatcttctatggtgggag

SEQ ID NO: 852 - RNA, 19 nt, synthetic construct
  misc_feature 1..19: note = Targeting domain
  source 1..19: mol_type = other RNA
gtatcttctatggtgggag

SEQ ID NO: 853 - RNA, 20 nt, synthetic construct
  misc_feature 1..20: note = Targeting domain
  source 1..20: mol_type = other RNA
ggtatcttctatggtgggag

SEQ ID NO: 854 - RNA, 21 nt, synthetic construct
  misc_feature 1..21: note = Targeting domain
  source 1..21: mol_type = other RNA
tggtatcttctatggtgggag

SEQ ID NO: 855 - RNA, 22 nt, synthetic construct
  misc_feature 1..22: note = Targeting domain
  source 1..22: mol_type = other RNA
ctggtatcttctatggtgggag

SEQ ID NO: 856 - RNA, 23 nt, synthetic construct
  misc_feature 1..23: note = Targeting domain
  source 1..23: mol_type = other RNA
cctggtatcttctatggtgggag

SEQ ID NO: 857 - RNA, 24 nt, synthetic construct
  misc_feature 1..24: note = Targeting domain
  source 1..24: mol_type = other RNA
tcctggtatcttctatggtgggag

SEQ ID NO: 858 - RNA, 18 nt, synthetic construct
  misc_feature 1..18: note = Targeting domain
  source 1..18: mol_type = other RNA
tcctggtatcttctatgg

SEQ ID NO: 859 - RNA, 19 nt, synthetic construct
  misc_feature 1..19: note = Targeting domain
  source 1..19: mol_type = other RNA
gtcctggtatcttctatgg

SEQ ID NO: 860 - RNA, 21 nt, synthetic construct
  misc_feature 1..21: note = Targeting domain
  source 1..21: mol_type = other RNA
aagtcctggtatcttctatgg

SEQ ID NO: 861 - RNA, 22 nt, synthetic construct
  misc_feature 1..22: note = Targeting domain
  source 1..22: mol_type = other RNA
gaagtcctggtatcttctatgg

SEQ ID NO: 862 - RNA, 23 nt, synthetic construct
  misc_feature 1..23: note = Targeting domain
  source 1..23: mol_type = other RNA
agaagtcctggtatcttctatgg

SEQ ID NO: 863 - RNA, 24 nt, synthetic construct
  misc_feature 1..24: note = Targeting domain
  source 1..24: mol_type = other RNA
aagaagtcctggtatcttctatgg

SEQ ID NO: 864 - RNA, 18 nt, synthetic construct
  misc_feature 1..18: note = Targeting domain
  source 1..18: mol_type = other RNA
tggtatcttctatggtgg

SEQ ID NO: 865 - RNA, 19 nt, synthetic construct
  misc_feature 1..19: note = Targeting domain
  source 1..19: mol_type = other RNA
ctggtatcttctatggtgg

SEQ ID NO: 866 - RNA, 20 nt, synthetic construct
  misc_feature 1..20: note = Targeting domain
  source 1..20: mol_type = other RNA
cctggtatcttctatggtgg

SEQ ID NO: 867 - RNA, 21 nt, synthetic construct
  misc_feature 1..21: note = Targeting domain
  source 1..21: mol_type = other RNA
tcctggtatcttctatggtgg

SEQ ID NO: 868 - RNA, 22 nt, synthetic construct
  misc_feature 1..22: note = Targeting domain
  source 1..22: mol_type = other RNA
gtcctggtatcttctatggtgg

SEQ ID NO: 869 - RNA, 23 nt, synthetic construct
  misc_feature 1..23: note = Targeting domain
  source 1..23: mol_type = other RNA
agtcctggtatcttctatggtgg

SEQ ID NO: 870 - RNA, 24 nt, synthetic construct
  misc_feature 1..24: note = Targeting domain
  source 1..24: mol_type = other RNA
aagtcctggtatcttctatggtgg

SEQ ID NO: 871 - RNA, 18 nt, synthetic construct
  misc_feature 1..18: note = Targeting domain
  source 1..18: mol_type = other RNA
gtcctggtatcttctatg

SEQ ID NO: 872 - RNA, 19 nt, synthetic construct
  misc_feature 1..19: note = Targeting domain
  source 1..19: mol_type = other RNA
agtcctggtatcttctatg

SEQ ID NO: 873 - RNA, 20 nt, synthetic construct
  misc_feature 1..20: note = Targeting domain
  source 1..20: mol_type = other RNA
aagtcctggtatcttctatg

SEQ ID NO: 874 - RNA, 21 nt, synthetic construct
  misc_feature 1..21: note = Targeting domain
  source 1..21: mol_type = other RNA
gaagtcctggtatcttctatg

SEQ ID NO: 875 - RNA, 22 nt, synthetic construct
  misc_feature 1..22: note = Targeting domain
  source 1..22: mol_type = other RNA
agaagtcctggtatcttctatg

SEQ ID NO: 876 - RNA, 23 nt, synthetic construct
  misc_feature 1..23: note = Targeting domain
  source 1..23: mol_type = other RNA
aagaagtcctggtatcttctatg

SEQ ID NO: 877 - RNA, 24 nt, synthetic construct
  misc_feature 1..24: note = Targeting domain
  source 1..24: mol_type = other RNA
aaagaagtcctggtatcttctatg

SEQ ID NO: 878 - RNA, 18 nt, synthetic construct
  misc_feature 1..18: note = Targeting domain
  source 1..18: mol_type = other RNA
aaattggaatgactgaat

SEQ ID NO: 879 - RNA, 19 nt, synthetic construct
  misc_feature 1..19: note = Targeting domain
  source 1..19: mol_type = other RNA
aaaattggaatgactgaat

SEQ ID NO: 880 - RNA, 21 nt, synthetic construct
  misc_feature 1..21: note = Targeting domain
  source 1..21: mol_type = other RNA
gaaaaattggaatgactgaat

SEQ ID NO: 881 - RNA, 22 nt, synthetic construct
  misc_feature 1..22: note = Targeting domain
  source 1..22: mol_type = other RNA
agaaaaattggaatgactgaat

SEQ ID NO: 882 - RNA, 23 nt, synthetic construct
  misc_feature 1..23: note = Targeting domain
  source 1..23: mol_type = other RNA
gagaaaaattggaatgactgaat

SEQ ID NO: 883 - RNA, 24 nt, synthetic construct
  misc_feature 1..24: note = Targeting domain
  source 1..24: mol_type = other RNA
agagaaaaattggaatgactgaat

SEQ ID NO: 884 - RNA, 18 nt, synthetic construct
  misc_feature 1..18: note = Targeting domain
  source 1..18: mol_type = other RNA
taagcagcagtatcctct

SEQ ID NO: 885 - RNA, 19 nt, synthetic construct
  misc_feature 1..19: note = Targeting domain
  source 1..19: mol_type = other RNA
ttaagcagcagtatcctct

SEQ ID NO: 886 - RNA, 21 nt, synthetic construct
  misc_feature 1..21: note = Targeting domain
  source 1..21: mol_type = other RNA
aattaagcagcagtatcctct

SEQ ID NO: 887 - RNA, 22 nt, synthetic construct
  misc_feature 1..22: note = Targeting domain
  source 1..22: mol_type = other RNA
aaattaagcagcagtatcctct

SEQ ID NO: 888 - RNA, 23 nt, synthetic construct
  misc_feature 1..23: note = Targeting domain
  source 1..23: mol_type = other RNA
aaaattaagcagcagtatcctct

SEQ ID NO: 889 - RNA, 24 nt, synthetic construct
  misc_feature 1..24: note = Targeting domain
  source 1..24: mol_type = other RNA
aaaaattaagcagcagtatcctct

SEQ ID NO: 890 - RNA, 18 nt, synthetic construct
  misc_feature 1..18: note = Targeting domain
  source 1..18: mol_type = other RNA
cctggtatcttctatggt

SEQ ID NO: 891 - RNA, 19 nt, synthetic construct
  misc_feature 1..19: note = Targeting domain
  source 1..19: mol_type = other RNA
tcctggtatcttctatggt

SEQ ID NO: 892 - RNA, 21 nt, synthetic construct
  misc_feature 1..21: note = Targeting domain
  source 1..21: mol_type = other RNA
agtcctggtatcttctatggt

SEQ ID NO: 893 - RNA, 22 nt, synthetic construct
  misc_feature 1..22: note = Targeting domain
  source 1..22: mol_type = other RNA
aagtcctggtatcttctatggt

SEQ ID NO: 894 - RNA, 23 nt, synthetic construct
  misc_feature 1..23: note = Targeting domain
  source 1..23: mol_type = other RNA
gaagtcctggtatcttctatggt

SEQ ID NO: 895 - RNA, 24 nt, synthetic construct
  misc_feature 1..24: note = Targeting domain
  source 1..24: mol_type = other RNA
agaagtcctggtatcttctatggt

SEQ ID NO: 896 - RNA, 18 nt, synthetic construct
  misc_feature 1..18: note = Targeting domain
  source 1..18: mol_type = other RNA
aagcagcagtatcctctt

SEQ ID NO: 897 - RNA, 19 nt, synthetic construct
  misc_feature 1..19: note = Targeting domain
  source 1..19: mol_type = other RNA
taagcagcagtatcctctt

SEQ ID NO: 898 - RNA, 21 nt, synthetic construct
  misc_feature 1..21: note = Targeting domain
  source 1..21: mol_type = other RNA
attaagcagcagtatcctctt

SEQ ID NO: 899 - RNA, 22 nt, synthetic construct
  misc_feature 1..22: note = Targeting domain
  source 1..22: mol_type = other RNA
aattaagcagcagtatcctctt

SEQ ID NO: 900 - RNA, 23 nt, synthetic construct
  misc_feature 1..23: note = Targeting domain
  source 1..23: mol_type = other RNA
aaattaagcagcagtatcctctt

SEQ ID NO: 901 - RNA, 24 nt, synthetic construct
  misc_feature 1..24: note = Targeting domain
  source 1..24: mol_type = other RNA
aaaattaagcagcagtatcctctt

SEQ ID NO: 902 - DNA, 4758 bp, Homo sapiens
  misc_feature 2716..2719: note = HPFH deletion site (4 bp del -225 to -222)
  misc_feature 2748..2753: note = GATA1 binding motif
  misc_feature 2762..2767: note = GATA1 binding motif
  misc_feature 2791..2799: note = FKLF transcription factor binding motif
  misc_feature 2823..2830: note = CP1/Coup TFII binding motif
  misc_feature 2824..2836: note = HPFH deletion site (13 bp del -114 to -102)
  misc_feature 2991..2993: note = Start codon
  source 1..4758: mol_type = other DNA
tttaggaagtcaaggtttaggcagggatagccattctattttattaggggcaatactatttccaacggcatctggcttttctcagcccttgtgaggctctacagggaggttgaggtgttagagatcagagcaggaaacaggtttttctttccacggtaactacaatgaagtgatccttactttactaaggaacttttcattttaagtgttgacgcatgcctaaagaggtgaaattaatcccatacccttaagtctacagactggtcacagcatttcaaggaggagacctcattgtaagcttctagggaggtggggacttaggtgaaggaaatgagccagcagaagctcacaagtcagcatcagcgtgtcatgtctcagcagcagaacagcacggtcagatgaaaatatagtgtgaagaatttgtataacattaattgagaaggcagattcactggagttcttatataattgaaagttaatgcacgttaataagcaagagtttagtttaatgtgatggtgttatgaacttaacgcttgtgtctccagaaaattcacatgctgaatccccaactcccaattggctccatttgtgggggaggctttggaaaagtaatcaggtttagaggagctcatgagagcagatccccatcatagaattattttcctcatcagaagcagagagattagccatttctcttccttctggtgaggacacagtgggaagtcagccacctgcaacccaggaagagagccctgaccaggaaccagcagaaaagtgagaaaaaatcctgttgttgaagtcacccagtctatgctattttgttatagcaccttgcactaagtaaggcagatgaagaaagagaaaaaaataagcttcggtgttcagtggattagaaaccatgtttatctcaggtttacaaatctccacttgtcctctgtgtttcagaataaaataccaactctactactctcatctgtaagatgcaaatagtaagcctgagcccttctgtctaactttgaattctattttttcttcaacgtactttaggcttgtaatgtgtttatatacagtgaaatgtcaagttctttctttatatttctttctttcttttttttcctcagcctcagagttttccacatgcccttcctactttcaggaacttctttctccaaacgtcttctgcctggctccatcaaatcataaaggacccacttcaaatgccatcactcactaccatttcacaattcgcactttctttctttgtcctttttttttttagtaaaacaagtttataaaaaattgaaggaataaatgaatggctacttcataggcagagtagacgcaagggctactggttgccgatttttattgttatttttcaatagtatgctaaacaaggggtagattatttatgctgcccatttttagaccataaaagataacttcctgatgttgccatggcatttttttccttttaattttatttcatttcattttaatttcgaaggtacatgtgcaggatgtgcaggcttgttacatgggtaaatgtgtgtctttctggccttttagccatctgtatcaatgagcagatataagctttacacaggatcatgaaggatgaaagaatttcaccaatattataataatttcaatcaacctgatagcttaggggataaactaatttgaagatacagcttgcctccgataagccagaattccagagcttctggcattataatctagcaaggttagagatcatggatcactttcagagaaaaacaaaaacaaactaaccaaaagcaaaacagaaccaaaaaaccaccataaatacttcctaccctgttaatggtccaatatgtcagaaacagcactgtgttagaaataaagctgtctaaagtacactaatattcgagttataatagtgtgtggactattagtcaataaaaacaacccttgcctctttagagttgttttccatgtacacgcacatcttatgtcttagagtaagattccctgagaagtgaacctagcatttatacaagataattaattctaatccacagtacctgccaaagaacattctaccatcatctttactgagcatagaagagctacgccaaaaccctgggtcatcagccagcacacacacttatccagtggtaaatacacatcatctggtgtatacatacatacctgaatatggaatcaaatatttttctaagatgaaacagtcatgatttatttcaaataggtacggataagtagatattgaggtaagcattaggtcttatattatgtaacactaatctattactgcgctgaaactgtggctttatagaaattgttttcactgcactattgagaaattaagagataatggcaaaagtcacaaagagtatattcaaaaagaagtatagcactttttccttagaaaccactgctaactgaaagagactaagatttgtcccgtcaaaaatcctggacctatgcctaaaacacatttcacaatccctgaacttttcaaaaattggtacatgctttagctttaaactacaggcctcactggagctagagacaagaaggtaaaaaacggctgacaaaagaagtcctggtatcctctatgatgggagaaggaaactagctaaagggaagaataaattagagaaaaactggaatgactgaatcggaacaaggcaaaggctataaaaaaaattagcagtatcctcttgggggccccttccccacactatctcaatgcaaatatctgtctgaaacggtccctggctaaactccacccatgggttggccagccttgccttgaccaatagccttgacaaggcaaacttgaccaatagtcttagagtatccagtgaggccaggggccggcggctggctagggatgaagaataaaaggaagcacccttcagcagttccacacactcgcttctggaacgtctgaggttatcaataagctcctagtccagacgccatgggtcatttcacagaggaggacaaggctactatcacaagcctgtggggcaaggtgaatgtggaagatgctggaggagaaaccctgggaaggtaggctctggtgaccaggacaagggagggaaggaaggaccctgtgcctggcaaaagtccaggtcgcttctcaggatttgtggcaccttctgactgtcaaactgttcttgtcaatctcacaggctcctggttgtctacccatggacccagaggttctttgacagctttggcaacctgtcctctgcctctgccatcatgggcaaccccaaagtcaaggcacatggcaagaaggtgctgacttccttgggagatgccacaaagcacctggatgatctcaagggcacctttgcccagctgagtgaactgcactgtgacaagctgcatgtggatcctgagaacttcaaggtgagtccaggagatgtttcagccctgttgcctttagtctcgaggcaacttagacaacggagtattgatctgagcacagcagggtgtgagctgtttgaagatactggggttgggggtgaagaaactgcagaggactaactgggctgagacccagtggtaatgttttagggcctaaggagtgcctctaaaaatctagatggacaattttgactttgagaaaagagaggtggaaatgaggaaaatgacttttctttattagattccagtagaaagaactttcatctttccctcatttttgttgttttaaaacatctatctggaggcaggacaagtatggtcgttaaaaagatgcaggcagaaggcatatattggctcagtcaaagtggggaactttggtggccaaacatacattgctaaggctattcctatatcagctggacacatataaaatgctgctaatgcttcattacaaacttatatcctttaattccagatgggggcaaagtatgtccaggggtgaggaacaattgaaacatttgggctggagtagattttgaaagtcagctctgtgtgtgtgtgtgtgtgtgcgcgcgcgcgtgtgtgtgtgtgtgtcagcgtgtgtttcttttaacgtcttcagcctacaacatacagggttcatggtggcaagaagatagcaagatttaaattatggccagtgactagtgcttgaaggggaacaactacctgcatttaatgggaaggcaaaatctcaggctttgagggaagttaacataggcttgattctgggtggaagcttggtgtgtagttatctggaggccaggctggagctctcagctcactatgggttcatctttattgtctcctttcatctcaacagctcctgggaaatgtgctggtgaccgttttggcaatccatttcggcaaagaattcacccctgaggtgcaggcttcctggcagaagatggtgactgcagtggccagtgccctgtcctccagataccactgagctcactgcccatgattcagagctttcaaggataggctttattctgcaagcaatacaaataataaatctattctgctgagagatcacacatgattttcttcagctcttttttttacatctttttaaatatatgagccacaaagggtttatattgagggaagtgtgtatgtgtatttctgcatgcctgtttgtgtttgtggtgtgtgcatgctcctcatttatttttatatgagatgtgcattttgatgagcaaataaaagcagtaaagacacttgtacacgggagttctgcaagtgggagtaaatggtgtaggagaaatccg

SEQ ID NO: 903 - DNA, 4773 bp, Homo sapiens
  misc_feature 1233..1238: note = GATA1 binding site
  misc_feature 2672..2677: note = GATA1 binding site
  misc_feature 2686..2691: note = GATA1 binding site
  misc_feature 2715..2723: note = FKLF transcription factor binding motif
  misc_feature 2747..2754: note = CP1/Coup TFII binding motif
  misc_feature 2748..2760: note = HPFH deletion site (13 bp del -114 to -102)
  misc_feature 2915..2917: note = Start codon
  source 1..4773: mol_type = other DNA
ttatgtcattaccagagttaaaattctataatggcttctcactccctaccactgaggacaagtttatgtccttaggtttatgcttccctgaaacaataccacctgctattctccactttacatatcaacggcactggttctttatctaactctctggcacagcaggagtttgttttcttctgcttcagagctttgaatttactatttcagcttctaaactttatttggcaatgccttcccatggcagattccttctgtcattttgcctctgttcgaatactttctccttaatttcattcttagttaataatatctgaaattattttgttgtttaacttaattattaattttatgtatgttctacctagattataatcttcagaggaaagttttattctctgacttatttaacttaaatgcccactactttaaaaattatgacatttatttaacagatatttgctgaacaaatgtttgaaaatacatgggaaagaatgcttgaaaacacttgaaattgcttgtgtaaagaaacagttttatcagttaggatttaatcaatgtcagaagcaatgatataggaaaaatcgaggaataagacagttatggataaggagaaatcaacaaactcttaaaagatattgcctcaaaagcataagaggaaataagggtttatacatgacttttagaacactgccttggtttttggataaatggggaagttgtttgaaaacaggagggatcctagatattccttagtctgaggaggagcaattaagattcacttgtttagaggctgggagtggtggctcacgcctgtaatcccagaattttgggaggccaaggcaggcagatcacctgaggtcaagagttcaagaccaacctggccaacatggtgaaatcccatctctacaaaaatacaaaaattagacaggcatgatggcaagtgcctgtaatcccagctacttgggaggctgaggaaggagaattgcttgaacctggaaggcaggagttgcagtgagccgagatcataccactgcactccagcctgggtgacagaacaagactctgtctcaaaaaaaaaaaagagagattcaaaagattcacttgtttaggccttagcgggcttagacaccagtctctgacacattcttaaaggtcaggctctacaaatggaacccaaccagactctcagatatggccaaagatctatacacacccatctcacagatcccctatcttaaagagaccctaatttgggttcacctcagtctctataatctgtaccagcataccaataaaaatctttctcacccatccttagattgagagaagtcacttattattatgtgagtaactggaagatactgataagttgacaaatctttttctttcctttcttattcaacttttattttaacttccaaagaacaagtgcaatatgtgcagctttgttgcgcaggtcaacatgtatctttctggtcttttagccgcctaacactttgagcagatataagccttacacaggattatgaagtctgaaaggattccaccaatattattataattcctatcaacctgataggttaggggaaggtagagctctcctccaataagccagatttccagagtttctgacgtcataatctaccaaggtcatggatcgagttcagagaaaaaacaaaagcaaaaccaaacctaccaaaaaataaaaatcccaaagaaaaaataaagaaaaaaacagcatgaatacttcctgccatgttaagtggccaatatgtcagaaacagcactgagttacagataaagatgtctaaactacagtgacatcccagctgtcacagtgtgtggactattagtcaataaaacagtccctgcctcttaagagttgttttccatgcaaatacatgtcttatgtcttagaataagattccctaagaagtgaacctagcatttatacaagataattaattctaatccatagtatctggtaaagagcattctaccatcatctttaccgagcatagaagagctacaccaaaaccctgggtcatcagccagcacatacacttatccagtgataaatacacatcatcgggtgcctacatacatacctgaatataaaaaaaatacttttgctgagatgaaacaggcgtgatttatttcaaataggtacggataagtagatattgaagtaaggattcagtcttatattatattacataacattaatctattcctgcactgaaactgttgctttataggatttttcactacactaatgagaacttaagagataatggcctaaaaccacagagagtatattcaaagataagtatagcacttcttatttggaaaccaatgcttactaaatgagactaagacgtgtcccatcaaaaatcctggacctatgcctaaaacacatttcacaatccctgaacttttcaaaaattggtacatgctttaactttaaactacaggcctcactggagctacagacaagaaggtgaaaaacggctgacaaaagaagtcctggtatcttctatggtgggagaagaaaactagctaaagggaagaataaattagagaaaaattggaatgactgaatcggaacaaggcaaaggctataaaaaaaattaagcagcagtatcctcttgggggccccttccccacactatctcaatgcaaatatctgtctgaaacggtccctggctaaactccacccatgggttggccagccttgccttgaccaatagccttgacaaggcaaacttgaccaatagtcttagagtatccagtgaggccaggggccggcggctggctagggatgaagaataaaaggaagcacccttcagcagttccacacactcgcttctggaacgtctgaggttatcaataagctcctagtccagacgccatgggtcatttcacagaggaggacaaggctactatcacaagcctgtggggcaaggtgaatgtggaagatgctggaggagaaaccctgggaaggtaggctctggtgaccaggacaagggagggaaggaaggaccctgtgcctggcaaaagtccaggtcgcttctcaggatttgtggcaccttctgactgtcaaactgttcttgtcaatctcacaggctcctggttgtctacccatggacccagaggttctttgacagctttggcaacctgtcctctgcctctgccatcatgggcaaccccaaagtcaaggcacatggcaagaaggtgctgacttccttgggagatgccataaagcacctggatgatctcaagggcacctttgcccagctgagtgaactgcactgtgacaagctgcatgtggatcctgagaacttcaaggtgagtccaggagatgtttcagcactgttgcctttagtctcgaggcaacttagacaactgagtattgatctgagcacagcagggtgtgagctgtttgaagatactggggttgggagtgaagaaactgcagaggactaactgggctgagacccagtggcaatgttttagggcctaaggagtgcctctgaaaatctagatggacaactttgactttgagaaaagagaggtggaaatgaggaaaatgacttttctttattagatttcggtagaaagaactttcacctttcccctatttttgttattcgttttaaaacatctatctggaggcaggacaagtatggtcattaaaaagatgcaggcagaaggcatatattggctcagtcaaagtggggaactttggtggccaaacatacattgctaaggctattcctatatcagctggacacatataaaatgctgctaatgcttcattacaaacttatatcctttaattccagatgggggcaaagtatgtccaggggtgaggaacaattgaaacatttgggctggagtagattttgaaagtcagctctgtgtgtgtgtgtgtgtgtgtgcgcgcgtgtgtttgtgtgtgtgtgagagcgtgtgtttcttttaacgttttcagcctacagcatacagggttcatggtggcaagaagataacaagatttaaattatggccagtgactagtgctgcaagaagaacaactacctgcatttaatgggaaagcaaaatctcaggctttgagggaagttaacataggcttgattctgggtggaagcttggtgtgtagttatctggaggccaggctggagctctcagctcactatgggttcatctttattgtctcctttcatctcaacagctcctgggaaatgtgctggtgaccgttttggcaatccatttcggcaaagaattcacccctgaggtgcaggcttcctggcagaagatggtgactggagtggccagtgccctgtcctccagataccactgagctcactgcccatgatgcagagctttcaaggataggctttattctgcaagcaatcaaataataaatctattctgctaagagatcacacatggttgtcttcagttctttttttatgtctttttaaatatatgagccacaaagggttttatgttgagggatgtgtttatgtgtatttatacatggctatgtgtgtttgtgtcatgtgcacactccacacttttttgtttacgttagatgtgggttttgatgagcaaataaaagaactaggcaataaagaaacttgtacatgggagttctgcaagtgggagtaaaaggtgcaggagaaatctggttggaagaaagacctctataggacaggactcctcagaaacagatgttttggaagagatggggaaaggttcagtgaa

SEQ ID NO: 904 - DNA, 87 bp, synthetic construct
  misc_feature 1..87: note = ssODN1 5' homology arm
  source 1..87: mol_type = other DNA
gggtgcttccttttattcttcatccctagccagccgccggcccctggcctcactggatactctaagactattggtcaagtttgcctt

SEQ ID NO: 905 - DNA, 89 bp, synthetic construct
  misc_feature 1..89: note = ssODN1 3' homology arm
  source 1..89: mol_type = other DNA
gtcaaggcaaggctggccaacccatgggtggagtttagccagggaccgtttcagacagatatttgcattgagatagtgtggggaagggg

SEQ ID NO: 906 - DNA, 176 bp, synthetic construct
  misc_feature 1..176: note = ssODN1
  source 1..176: mol_type = other DNA
gggtgcttccttttattcttcatccctagccagccgccggcccctggcctcactggatactctaagactattggtcaagtttgccttgtcaaggcaaggctggccaacccatgggtggagtttagccagggaccgtttcagacagatatttgcattgagatagtgtggggaagggg

SEQ ID NO: 907 - DNA, 87 bp, synthetic construct; identical to SEQ ID NO: 904
  misc_feature 1..87: note = PhTx ssODN1 5' homology arm
  misc_feature 1..2: note = Linked by phosphorothioate (PS) bond
  source 1..87: mol_type = other DNA

SEQ ID NO: 908 - DNA, 89 bp, synthetic construct; identical to SEQ ID NO: 905
  misc_feature 1..89: note = PhTx ssODN1 3' homology arm
  misc_feature 88..89: note = Linked by phosphorothioate (PS) bond
  source 1..89: mol_type = other DNA

SEQ ID NO: 909 - DNA, 176 bp, synthetic construct; identical to SEQ ID NO: 906
  misc_feature 1..176: note = PhTx ssODN1
  misc_feature 1..2: note = Linked by phosphorothioate (PS) bond
  misc_feature 175..176: note = Linked by phosphorothioate (PS) bond
  source 1..176: mol_type = other DNA

SEQ ID NO: 910 - DNA, 17 bp, synthetic construct
  misc_feature 1..17: note = targeting domain
  source 1..17: mol_type = other DNA
ggctattggtcaaggca

SEQ ID NO: 911 - DNA, 20 bp, synthetic construct
  misc_feature 1..20: note = targeting domain
  source 1..20: mol_type = other DNA
caaggctattggtcaaggca

SEQ ID NO: 912 - DNA, 17 bp, synthetic construct
  misc_feature 1..17: note = targeting domain
  source 1..17: mol_type = other DNA
tgccttgtcaaggctat

SEQ ID NO: 913 - DNA, 20 bp, synthetic construct
  misc_feature 1..20: note = targeting domain
  source 1..20: mol_type = other DNA
gtttgccttgtcaaggctat

SEQ ID NO: 914 - DNA, 17 bp, synthetic construct
  misc_feature 1..17: note = targeting domain
  source 1..17: mol_type = other DNA
gaccaatagccttgaca

SEQ ID NO: 915 - DNA, 20 bp, synthetic construct
  misc_feature 1..20: note = targeting domain
  source 1..20: mol_type = other DNA
cttgaccaatagccttgaca

SEQ ID NO: 916 - DNA, 17 bp, synthetic construct
  misc_feature 1..17: note = targeting domain
  source 1..17: mol_type = other DNA
gtcaaggctattggtca

SEQ ID NO: 917 - DNA, 20 bp, synthetic construct
  misc_feature 1..20: note = targeting domain
  source 1..20: mol_type = other DNA
cttgtcaaggctattggtca

SEQ ID NO: 918 - DNA, 17 bp, synthetic construct
  misc_feature 1..17: note = targeting domain
  source 1..17: mol_type = other DNA
tcaagtttgccttgtca

SEQ ID NO: 919 - DNA, 20 bp, synthetic construct
  misc_feature 1..20: note = targeting domain
  source 1..20: mol_type = other DNA
tggtcaagtttgccttgtca

SEQ ID NO: 920 - RNA, 20 nt, synthetic construct
  misc_feature 1..20: note = targeting domain plus PAM (NGG)
  source 1..20: mol_type = other RNA
ggctattggtcaaggcaagg

SEQ ID NO: 921 - RNA, 23 nt, synthetic construct
  misc_feature 1..23: note = targeting domain plus PAM (NGG)
  source 1..23: mol_type = other RNA
caaggctattggtcaaggcaagg

SEQ ID NO: 922 - RNA, 20 nt, synthetic construct
  misc_feature 1..20: note = targeting domain plus PAM (NGG)
  source 1..20: mol_type = other RNA
tgccttgtcaaggctattgg

SEQ ID NO: 923 - RNA, 23 nt, synthetic construct
  misc_feature 1..23: note = targeting domain plus PAM (NGG)
  source 1..23: mol_type = other RNA
gtttgccttgtcaaggctattgg

SEQ ID NO: 924 - RNA, 20 nt, synthetic construct
  misc_feature 1..20: note = targeting domain plus PAM (NGG)
  source 1..20: mol_type = other RNA
gaccaatagccttgacaagg

SEQ ID NO: 925 - RNA, 23 nt, synthetic construct
  misc_feature 1..23: note = targeting domain plus PAM (NGG)
  source 1..23: mol_type = other RNA
cttgaccaatagccttgacaagg

SEQ ID NO: 926 - RNA, 20 nt, synthetic construct
  misc_feature 1..20: note = targeting domain plus PAM (NGG)
  source 1..20: mol_type = other RNA
gtcaaggctattggtcaagg

SEQ ID NO: 927 - RNA, 23 nt, synthetic construct
  misc_feature 1..23: note = targeting domain plus PAM (NGG)
  source 1..23: mol_type = other RNA
cttgtcaaggctattggtcaagg

SEQ ID NO: 928 - RNA, 20 nt, synthetic construct
  misc_feature 1..20: note = targeting domain plus PAM (NGG)
  source 1..20: mol_type = other RNA
tcaagtttgccttgtcaagg

SEQ ID NO: 929 - RNA, 23 nt, synthetic construct
  misc_feature 1..23: note = targeting domain plus PAM (NGG)
  source 1..23: mol_type = other RNA
tggtcaagtttgccttgtcaagg

SEQ ID NO: 930 - DNA, 20 bp, synthetic construct
  misc_feature 1..20: note = targeting domain plus PAM (NGG)
  source 1..20: mol_type = other DNA
ggctattggtcaaggcaagg

SEQ ID NO: 931 - DNA, 23 bp, synthetic construct
  misc_feature 1..23: note = targeting domain plus PAM (NGG)
  source 1..23: mol_type = other DNA
caaggctattggtcaaggcaagg

SEQ ID NO: 932 - DNA, 20 bp, synthetic construct
  misc_feature 1..20: note = targeting domain plus PAM (NGG)
  source 1..20: mol_type = other DNA
tgccttgtcaaggctattgg

SEQ ID NO: 933 - DNA, 23 bp, synthetic construct
  misc_feature 1..23: note = targeting domain plus PAM (NGG)
  source 1..23: mol_type = other DNA
gtttgccttgtcaaggctattgg

SEQ ID NO: 934 - DNA, 20 bp, synthetic construct
  misc_feature 1..20: note = targeting domain plus PAM (NGG)
  source 1..20: mol_type = other DNA
gaccaatagccttgacaagg

SEQ ID NO: 935 - DNA, 23 bp, synthetic construct
  misc_feature 1..23: note = targeting domain plus PAM (NGG)
  source 1..23: mol_type = other DNA
cttgaccaatagccttgacaagg

SEQ ID NO: 936 - DNA, 20 bp, synthetic construct
  misc_feature 1..20: note = targeting domain plus PAM (NGG)
  source 1..20: mol_type = other DNA
gtcaaggctattggtcaagg

SEQ ID NO: 937 - DNA, 23 bp, synthetic construct
  misc_feature 1..23: note = targeting domain plus PAM (NGG)
  source 1..23: mol_type = other DNA
cttgtcaaggctattggtcaagg

SEQ ID NO: 938 - DNA, 20 bp, synthetic construct
  misc_feature 1..20: note = targeting domain plus PAM (NGG)
  source 1..20: mol_type = other DNA
tcaagtttgccttgtcaagg

SEQ ID NO: 939 - DNA, 23 bp, synthetic construct
  misc_feature 1..23: note = targeting domain plus PAM (NGG)
  source 1..23: mol_type = other DNA
tggtcaagtttgccttgtcaagg

SEQ ID NO: 940 - RNA, 17 nt, synthetic construct
  misc_feature 1..17: note = targeting domain
  source 1..17: mol_type = other RNA
agtatccagtgaggcca

SEQ ID NO: 941 - RNA, 20 nt, synthetic construct
  misc_feature 1..20: note = targeting domain
  source 1..20: mol_type = other RNA
ggcaaggctggccaacccat

SEQ ID NO: 942 - RNA, 20 nt, synthetic construct
  misc_feature 1..20: note = targeting domain
  source 1..20: mol_type = other RNA
tatttgcattgagatagtgt

SEQ ID NO: 943 - DNA, 17 bp, synthetic construct
  misc_feature 1..17: note = targeting domain
  source 1..17: mol_type = other DNA
agtatccagtgaggcca

SEQ ID NO: 944 - DNA, 20 bp, synthetic construct
  misc_feature 1..20: note = targeting domain
  source 1..20: mol_type = other DNA
ggcaaggctggccaacccat

SEQ ID NO: 945 - DNA, 20 bp, synthetic construct
  misc_feature 1..20: note = targeting domain
  source 1..20: mol_type = other DNA
tatttgcattgagatagtgt

SEQ ID NO: 946 - RNA, 20 nt, synthetic construct
  misc_feature 1..20: note = targeting domain plus PAM (NGG)
  source 1..20: mol_type = other RNA
agtatccagtgaggccaggg

SEQ ID NO: 947 - RNA, 23 nt, synthetic construct
  misc_feature 1..23: note = targeting domain plus PAM (NGG)
  source 1..23: mol_type = other RNA
ggcaaggctggccaacccatggg

SEQ ID NO: 948 - RNA, 23 nt, synthetic construct
  misc_feature 1..23: note = targeting domain plus PAM (NGG)
  source 1..23: mol_type = other RNA
tatttgcattgagatagtgtggg

SEQ ID NO: 949 - DNA, 20 bp, synthetic construct
  misc_feature 1..20: note = targeting domain plus PAM (NGG)
  source 1..20: mol_type = other DNA
agtatccagtgaggccaggg

SEQ ID NO: 950 - DNA, 23 bp, synthetic construct
  misc_feature 1..23: note = targeting domain plus PAM (NGG)
  source 1..23: mol_type = other DNA
ggcaaggctggccaacccatggg

SEQ ID NO: 951 - DNA, 23 bp, synthetic construct
  misc_feature 1..23: note = targeting domain plus PAM (NGG)
  source 1..23: mol_type = other DNA
tatttgcattgagatagtgtggg

SEQ ID NO: 952 - RNA, 20 nt, synthetic construct
  misc_feature 1..20: note = targeting domain
  source 1..20: mol_type = other RNA
ctaacagttgcttttatcac

SEQ ID NO: 953 - RNA, 20 nt, synthetic construct
  misc_feature 1..20: note = targeting domain
  source 1..20: mol_type = other RNA
gggcgtgggtggggtagaag

SEQ ID NO: 954 - RNA, 20 nt, synthetic construct
  misc_feature 1..20: note = targeting domain
  source 1..20: mol_type = other RNA
ctcttagacataacacacca

SEQ ID NO: 955 - RNA, 20 nt, synthetic construct
  misc_feature 1..20: note = targeting domain
  source 1..20: mol_type = other RNA
atcagaggccaaacccttcc

SEQ ID NO: 956 - DNA, 20 bp, synthetic construct
  misc_feature 1..20: note = targeting domain
  source 1..20: mol_type = other DNA
ctaacagttgcttttatcac

SEQ ID NO: 957 - DNA, 20 bp, synthetic construct
  misc_feature 1..20: note = targeting domain
  source 1..20: mol_type = other DNA
gggcgtgggtggggtagaag

SEQ ID NO: 958 - DNA, 20 bp, synthetic construct
  misc_feature 1..20: note = targeting domain
  source 1..20: mol_type = other DNA
ctcttagacataacacacca

SEQ ID NO: 959 - DNA, 20 bp, synthetic construct
  misc_feature 1..20: note = targeting domain
  source 1..20: mol_type = other DNA
atcagaggccaaacccttcc

SEQ ID NO: 960 - RNA, 23 nt, synthetic construct
  misc_feature 1..23: note = targeting domain plus PAM (NGG)
  source 1..23: mol_type = other RNA
ctaacagttgcttttatcacagg

SEQ ID NO: 961 - RNA, 23 nt, synthetic construct
  misc_feature 1..23: note = targeting domain plus PAM (NGG)
  source 1..23: mol_type = other RNA
gggcgtgggtggggtagaagagg

SEQ ID NO: 962 - RNA, 23 nt, synthetic construct
  misc_feature 1..23: note = targeting domain plus PAM (NGG)
  source 1..23: mol_type = other RNA
ctcttagacataacacaccaggg

SEQ ID NO: 963 - RNA, 23 nt, synthetic construct
  misc_feature 1..23: note = targeting domain plus PAM (NGG)
  source 1..23: mol_type = other RNA
atcagaggccaaacccttcctgg

SEQ ID NO: 964 - DNA, 23 bp, synthetic construct
  misc_feature 1..23: note = targeting domain plus PAM (NGG)
  source 1..23: mol_type = other DNA
ctaacagttgcttttatcacagg

SEQ ID NO: 965 - DNA, 23 bp, synthetic construct
  misc_feature 1..23: note = targeting domain plus PAM (NGG)
  source 1..23: mol_type = other DNA
gggcgtgggtggggtagaagagg

SEQ ID NO: 966 - DNA, 23 bp, synthetic construct
  misc_feature 1..23: note = targeting domain plus PAM (NGG)
  source 1..23: mol_type = other DNA
ctcttagacataacacaccaggg

SEQ ID NO: 967 - DNA, 23 bp, synthetic construct
  misc_feature 1..23: note = targeting domain plus PAM (NGG)
  source 1..23: mol_type = other DNA
atcagaggccaaacccttcctgg

SEQ ID NO: 968 - DNA, 115 bp, synthetic construct
  misc_feature 1..115: note = +58 DHS enhancer
  source 1..115: mol_type = other DNA
caactttgaagctagtctagtgcaagctaacagttgcttttatcacaggctccaggaagggtttggcctctgattagggtgggggcgtgggtggggtagaagaggactggcagac

SEQ ID NO: 969 - DNA, 801 bp, synthetic construct
  misc_feature 1..801: note = +58 DHS enhancer region including ~500 bp upstream and ~200 bp downstream
  source 1..801: mol_type = other DNA
aggtaccttttgtgtgtatgtgctgattgagggcccattgagaatattttgacttttagggaagctccaaactctcaaaccacagggatcacaacacatacgtgtgtctgttatgacgttatatgtaagcatcacaacaggcagagaatgtctgcaccccaccctggaaaacagcctgactgtgccccatgggcaaaccagactagtttatagggggttctactctgaggtactgatggaccttgggtgctattcctgtgataaggaaggcagctagacaggacttgggagttatctgtagtgagatggctgaaaagcgatacagggctggctctatgccccaggtgtgcataagtaagagcagatagctgattccagtgcaaagtccatacaggtaataacataggccagaaaagagatatggcatctactcttagacataacacaccagggtcaatacaactttgaagctagtctagtgcaagctaacagttgcttttatcacaggctccaggaagggtttggcctctgattagggtgggggcgtgggtggggtagaagaggactggcagacctctccatcggtggccgtttgcccaggggggcctctttcggaaggctctcttggtgatggagaattggattttatttctcaatgggaatgaaataatttgtatgccatgccgtgtggactcccaaaattgtaaaggaggtgaagcttcccctgtctgcactctcccctcctcataattgtccatttttcatctgtcgggctgtccacccatccatcacatataggca

SEQ ID NO: 970 - RNA, 100 nt, synthetic construct
  misc_feature 1..100: note = Unmodified Sp35 gRNA (OLI7066)
  source 1..100: mol_type = other RNA
cttgtcaaggctattggtcagttttagagctagaaatagcaagttaaaataaggctagtccgttatcaacttgaaaaagtggcaccgagtcggtgctttt

SEQ ID NO: 971 - RNA, 100 nt, synthetic construct; identical to SEQ ID NO: 970
  misc_feature 1..100: note = Sp35 gRNA w/ 5' and 3' PS/OMe (OLI8394)
  misc_feature 1: note = Modified to contain 2'-O-methyl
  misc_feature 1..2: note = Linked by phosphorothioate (PS) bond
  misc_feature 2..3: note = Linked by phosphorothioate (PS) bond
  misc_feature 2: note = Modified to contain 2'-O-methyl
  misc_feature 3..4: note = Linked by phosphorothioate (PS) bond
  misc_feature 3: note = Modified to contain 2'-O-methyl
  misc_feature 97..98: note = Linked by phosphorothioate (PS) bond
  misc_feature 97: note = Modified to contain 2'-O-methyl
  misc_feature 98..99: note = Linked by phosphorothioate (PS) bond
  misc_feature 98: note = Modified to contain 2'-O-methyl
  misc_feature 99..100: note = Linked by phosphorothioate (PS) bond
  misc_feature 99: note = Modified to contain 2'-O-methyl
  source 1..100: mol_type = other RNA

SEQ ID NO: 972 - DNA, 100 bp, synthetic construct
  misc_feature 1..100: note = Unmodified Sp35 gRNA (OLI7066)
  source 1..100: mol_type = other DNA
cttgtcaaggctattggtcagttttagagctagaaatagcaagttaaaataaggctagtccgttatcaacttgaaaaagtggcaccgagtcggtgctttt

SEQ ID NO: 973 - DNA, 100 bp, synthetic construct; identical to SEQ ID NO: 972
  misc_feature 1..100: note = Sp35 gRNA w/ 5' and 3' PS/OMe (OLI8394)
  misc_feature 1: note = Modified to contain 2'-O-methyl
  misc_feature 1..2: note = Linked by phosphorothioate (PS) bond
  misc_feature 2: note = Modified to contain 2'-O-methyl
  misc_feature 2..3: note = Linked by phosphorothioate (PS) bond
  misc_feature 3: note = Modified to contain 2'-O-methyl
  misc_feature 3..4: note = Linked by phosphorothioate (PS) bond
  misc_feature 97: note = Modified to contain 2'-O-methyl
  misc_feature 97..98: note = Linked by phosphorothioate (PS) bond
  misc_feature 98: note = Modified to contain 2'-O-methyl
  misc_feature 98..99: note = Linked by phosphorothioate (PS) bond
  misc_feature 99: note = Modified to contain 2'-O-methyl
  misc_feature 99..100: note = Linked by phosphorothioate (PS) bond
  source 1..100: mol_type = other DNA

SEQ ID NO: 974 - DNA, 180 bp, synthetic construct
  misc_feature 1..180: note = Ptx ssODN 18nt - positive strand (OLI16409)
  misc_feature 1..2: note = Linked by phosphorothioate (PS) bond
  misc_feature 179..180: note = Linked by phosphorothioate (PS) bond
  source 1..180: mol_type = other DNA
ggtgcttccttttattcttcatccctagccagccgccggcccctggcctcactggatactctaagactattggtcaagtttgccttgtcaaggctggccaacccatgggtggagtttagccagggaccgtttcagacagatatttgcattgagatagtgtggggaaggggcccccaagag

SEQ ID NO: 975 - DNA, 180 bp, synthetic construct
  misc_feature 1..180: note = Ptx ssODN 18nt - negative strand (OLI16410)
  misc_feature 1..2: note = Linked by phosphorothioate (PS) bond
  misc_feature 179..180: note = Linked by phosphorothioate (PS) bond
  source 1..180: mol_type = other DNA
ctcttgggggccccttccccacactatctcaatgcaaatatctgtctgaaacggtccctggctaaactccacccatgggttggccagccttgacaaggcaaacttgaccaatagtcttagagtatccagtgaggccaggggccggcggctggctagggatgaagaataaaaggaagcacc

SEQ ID NO: 976 - DNA, 180 bp, synthetic construct
  misc_feature 1..180: note = Ptx ssODN 11nt - negative strand (OLI16411)
  misc_feature 1..2: note = Linked by phosphorothioate (PS) bond
  misc_feature 179..180: note = Linked by phosphorothioate (PS) bond
  source 1..180: mol_type = other DNA
ggccccttccccacactatctcaatgcaaatatctgtctgaaacggtccctggctaaactccacccatgggttggccagccttgccttgagacaaggcaaacttgaccaatagtcttagagtatccagtgaggccaggggccggcggctggctagggatgaagaataaaaggaagcaccc

SEQ ID NO: 977 - DNA, 180 bp, synthetic construct
  misc_feature 1..180: note = Ptx ssODN 13nt - negative strand (OLI16412)
  misc_feature 1..2: note = Linked by phosphorothioate (PS) bond
  misc_feature 179..180: note = Linked by phosphorothioate (PS) bond
  source 1..180: mol_type = other DNA
ggccccttccccacactatctcaatgcaaatatctgtctgaaacggtccctggctaaactccacccatgggttggccagccttgccttgacaaggcaaacttgaccaatagtcttagagtatccagtgaggccaggggccggcggctggctagggatgaagaataaaaggaagcaccctt

SEQ ID NO: 978 - DNA, 180 bp, synthetic construct
  misc_feature 1..180: note = Ptx ssODN 11nt - positive strand (OLI16413)
  misc_feature 1..2: note = Linked by phosphorothioate (PS) bond
  misc_feature 179..180: note = Linked by phosphorothioate (PS) bond
  source 1..180: mol_type = other DNA
gggtgcttccttttattcttcatccctagccagccgccggcccctggcctcactggatactctaagactattggtcaagtttgccttgtctcaaggcaaggctggccaacccatgggtggagtttagccagggaccgtttcagacagatatttgcattgagatagtgtggggaaggggcc

SEQ ID NO: 979 - DNA, 180 bp, synthetic construct
  misc_feature 1..180: note = Ptx ssODN 13nt - positive strand (OLI16414)
  misc_feature 1..2: note = Linked by phosphorothioate (PS) bond
  misc_feature 179..180: note = Linked by phosphorothioate (PS) bond
  source 1..180: mol_type = other DNA
aagggtgcttccttttattcttcatccctagccagccgccggcccctggcctcactggatactctaagactattggtcaagtttgccttgtcaaggcaaggctggccaacccatgggtggagtttagccagggaccgtttcagacagatatttgcattgagatagtgtggggaaggggcc

SEQ ID NO: 980 - DNA, 180 bp, synthetic construct
  misc_feature 1..180: note = Ptx ssODN 117G>A - negative strand (OLI16415)
  misc_feature 1..2: note = Linked by phosphorothioate (PS) bond
  misc_feature 179..180: note = Linked by phosphorothioate (PS) bond
  source 1..180: mol_type = other DNA
ggccccttccccacactatctcaatgcaaatatctgtctgaaacggtccctggctaaactccacccatgggttggccagccttgccttaaccaatagccttgacaaggcaaacttgaccaatagtcttagagtatccagtgaggccaggggccggcggctggctagggatgaagaataaa

SEQ ID NO: 981 - DNA, 180 bp, synthetic construct
  misc_feature 1..180: note = Ptx ssODN 117G>A - positive strand (OLI16416)
  misc_feature 1..2: note = Linked by phosphorothioate (PS) bond
  misc_feature 179..180: note = Linked by phosphorothioate (PS) bond
  source 1..180: mol_type = other DNA
tttattcttcatccctagccagccgccggcccctggcctcactggatactctaagactattggtcaagtttgccttgtcaaggctattggttaaggcaaggctggccaacccatgggtggagtttagccagggaccgtttcagacagatatttgcattgagatagtgtggggaaggggcc

SEQ ID NO: 982 - DNA, 180 bp, synthetic construct
  misc_feature 1..180: note = Ptx ssODN 1nt - negative strand (OLI16417)
  misc_feature 1..2: note = Linked by phosphorothioate (PS) bond
  misc_feature 179..180: note = Linked by phosphorothioate (PS) bond
  source 1..180: mol_type = other DNA
ggccccttccccacactatctcaatgcaaatatctgtctgaaacggtccctggctaaactccacccatgggttggccagccttgccttgccaatagccttgacaaggcaaacttgaccaatagtcttagagtatccagtgaggccaggggccggcggctggctagggatgaagaataaaa

SEQ ID NO: 983 - DNA, 180 bp, synthetic construct
  misc_feature 1..180: note = Ptx ssODN 1nt - positive strand (OLI16418)
  misc_feature 1..2: note = Linked by phosphorothioate (PS) bond
  misc_feature 179..180: note = Linked by phosphorothioate (PS) bond
  source 1..180: mol_type = other DNA
ttttattcttcatccctagccagccgccggcccctggcctcactggatactctaagactattggtcaagtttgccttgtcaaggctattggcaaggcaaggctggccaacccatgggtggagtttagccagggaccgtttcagacagatatttgcattgagatagtgtggggaaggggcc

SEQ ID NO: 984 - DNA, 120 bp, synthetic construct
  misc_feature 1..120: note = Ptx ssODN 4nt 40/80 - negative strand (OLI16419)
  misc_feature 1..2: note = Linked by phosphorothioate (PS) bond
  misc_feature 119..120: note = Linked by phosphorothioate (PS) bond
  source 1..120: mol_type = other DNA
tggctaaactccacccatgggttggccagccttgccttgatagccttgacaaggcaaacttgaccaatagtcttagagtatccagtgaggccaggggccggcggctggctagggatgaag

SEQ ID NO: 985 - DNA, 100 bp, synthetic construct
  misc_feature 1..100: note = Ptx ssODN 4nt 30/70 - negative strand (OLI16420)
  misc_feature 1..2: note = Linked by phosphorothioate (PS) bond
  misc_feature 99..100: note = Linked by phosphorothioate (PS) bond
  source 1..100: mol_type = other DNA
ccacccatgggttggccagccttgccttgatagccttgacaaggcaaacttgaccaatagtcttagagtatccagtgaggccaggggccggcggctggct

SEQ ID NO: 986 - DNA, 100 bp, synthetic construct
  misc_feature 1..100: note = Ptx ssODN 4nt - negative strand (OLI16421)
  misc_feature 1..2: note = Linked by phosphorothioate (PS) bond
  misc_feature 99..100: note = Linked by phosphorothioate (PS) bond
  source 1..100: mol_type = other DNA
aaacggtccctggctaaactccacccatgggttggccagccttgccttgatagccttgacaaggcaaacttgaccaatagtcttagagtatccagtgagg

SEQ ID NO: 987 - DNA, 120 bp, synthetic construct
  misc_feature 1..120: note = Ptx ssODN 4nt - negative strand (OLI16422)
  misc_feature 1..2: note = Linked by phosphorothioate (PS) bond
  misc_feature 119..120: note = Linked by phosphorothioate (PS) bond
  source 1..120: mol_type = other DNA
tatctgtctgaaacggtccctggctaaactccacccatgggttggccagccttgccttgatagccttgacaaggcaaacttgaccaatagtcttagagtatccagtgaggccaggggccg

SEQ ID NO: 988 - DNA, 140 bp, synthetic construct
  misc_feature 1..140: note = Ptx ssODN 4nt - negative strand (OLI16423)
  misc_feature 1..2: note = Linked by phosphorothioate (PS) bond
  misc_feature 139..140: note = Linked by phosphorothioate (PS) bond
  source 1..140: mol_type = other DNA
tcaatgcaaatatctgtctgaaacggtccctggctaaactccacccatgggttggccagccttgccttgatagccttgacaaggcaaacttgaccaatagtcttagagtatccagtgaggccaggggccggcggctggct

SEQ ID NO: 989 - DNA, 180 bp, synthetic construct
  misc_feature 1..180: note = Ptx ssODN 4nt - negative strand (OLI16424)
  misc_feature 1..2: note = Linked by phosphorothioate (PS) bond
  misc_feature 179..180: note = Linked by phosphorothioate (PS) bond
  source 1..180: mol_type = other DNA
ggccccttccccacactatctcaatgcaaatatctgtctgaaacggtccctggctaaactccacccatgggttggccagccttgccttgatagccttgacaaggcaaacttgaccaatagtcttagagtatccagtgaggccaggggccggcggctggctagggatgaagaataaaagga

SEQ ID NO: 990 - DNA, 120 bp, synthetic construct
  misc_feature 1..120: note = Ptx ssODN 4nt 40/80 - positive strand (OLI16425)
  misc_feature 1..2: note = Linked by phosphorothioate (PS) bond
  misc_feature 119..120: note = Linked by phosphorothioate (PS) bond
  source 1..120: mol_type = other DNA
tactctaagactattggtcaagtttgccttgtcaaggctatcaaggcaaggctggccaacccatgggtggagtttagccagggaccgtttcagacagatatttgcattgagatagtgtgg

SEQ ID NO: 991 - DNA, 100 bp, synthetic construct
  misc_feature 1..100: note = Ptx ssODN 4nt 30/70 - positive strand (OLI16426)
  misc_feature 1..2: note = Linked by phosphorothioate (PS) bond
  misc_feature 99..100: note = Linked by phosphorothioate (PS) bond
  source 1..100: mol_type = other DNA
ctattggtcaagtttgccttgtcaaggctatcaaggcaaggctggccaacccatgggtggagtttagccagggaccgtttcagacagatatttgcattga

SEQ ID NO: 992 - DNA, 100 bp, synthetic construct
  misc_feature 1..100: note = Ptx ssODN 4nt - positive strand (OLI16427)
  misc_feature 1..2: note = Linked by phosphorothioate (PS) bond
  misc_feature 99..100: note = Linked by phosphorothioate (PS) bond
  source 1..100: mol_type = other DNA
cctcactggatactctaagactattggtcaagtttgccttgtcaaggctatcaaggcaaggctggccaacccatgggtggagtttagccagggaccgttt

SEQ ID NO: 993 - DNA, 120 bp, synthetic construct
  misc_feature 1..120: note = Ptx ssODN 4nt - positive strand (OLI16428)
  misc_feature 1..2: note = Linked by phosphorothioate (PS) bond
  misc_feature 119..120: note = Linked by phosphorothioate (PS) bond
  source 1..120: mol_type = other DNA
cggcccctggcctcactggatactctaagactattggtcaagtttgccttgtcaaggctatcaaggcaaggctggccaacccatgggtggagtttagccagggaccgtttcagacagata

SEQ ID NO: 994 - DNA, 140 bp, synthetic construct
  misc_feature 1..140: note = Ptx ssODN 4nt - positive strand (OLI16429)
  misc_feature 1..2: note = Linked by phosphorothioate (PS) bond
  misc_feature 139..140: note = Linked by phosphorothioate (PS) bond
  source 1..140: mol_type = other DNA
agccagccgccggcccctggcctcactggatactctaagactattggtcaagtttgccttgtcaaggctatcaaggcaaggctggccaacccatgggtggagtttagccagggaccgtttcagacagatatttgcattga

SEQ ID NO: 995 - DNA, 180 bp, synthetic construct
  misc_feature 1..180: note = Ptx ssODN 4nt - positive strand (OLI16430)
  misc_feature 1..2: note = Linked by phosphorothioate (PS) bond
  misc_feature 179..180: note = Linked by phosphorothioate (PS) bond
  source 1..180: mol_type = other DNA
tccttttattcttcatccctagccagccgccggcccctggcctcactggatactctaagactattggtcaagtttgccttgtcaaggctatcaaggcaaggctggccaacccatgggtggagtttagccagggaccgtttcagacagatatttgcattgagatagtgtggggaaggggcc

SEQ ID NO: 996 - RNA, 100 nt, synthetic construct
  misc_feature 1..100: note = Sp37 gRNA (OLI17075)
  source 1..100: mol_type = other RNA
cttgaccaatagccttgacagttttagagctagaaatagcaagttaaaataaggctagtccgttatcaacttgaaaaagtggcaccgagtcggtgctttt

SEQ ID NO: 997 - RNA, 100 nt, synthetic construct
  misc_feature 1..100: note = SpA gRNA (OLI17074)
  source 1..100: mol_type = other RNA
ggcaaggctggccaacccatgttttagagctagaaatagcaagttaaaataaggctagtccgttatcaacttgaaaaagtggcaccgagtcggtgctttt

SEQ ID NO: 998 - DNA, 100 bp, synthetic construct
  misc_feature 1..100: note = Sp37 gRNA (OLI17075)
  source 1..100: mol_type = other DNA
cttgaccaatagccttgacagttttagagctagaaatagcaagttaaaataaggctagtccgttatcaacttgaaaaagtggcaccgagtcggtgctttt

SEQ ID NO: 999 - DNA, 100 bp, synthetic construct
  misc_feature 1..100: note = SpA gRNA (OLI17074)
  source 1..100: mol_type = other DNA
ggcaaggctggccaacccatgttttagagctagaaatagcaagttaaaataaggctagtccgttatcaacttgaaaaagtggcaccgagtcggtgctttt

SEQ ID NO: 1000 - protein, 1332 aa, synthetic construct
  REGION 1..1332: note = His-AsCpf1-nNLS
MKHHHHHHMTQFEGFTNLYQVSKTLRFELIPQGKTLKHIQEQGFIEEDKARNDHYKELKPIIDRIYKTYADQCLQLVQLDWENLSAAIDSYRKEKTEETRNALIEEQATYRNAIHDYFIGRTDNLTDAINKRHAEIYKGLFKAELFNGKVLKQLGTVTTTEHENALLRSFDKFTTYFSGFYENRKNVFSAEDISTAIPHRIVQDNFPKFKENCHIFTRLITAVPSLREHFENVKKAIGIFVSTSIEEVFSFPFYNQLLTQTQIDLYNQLLGGISREAGTEKIKGLNEVLNLAIQKNDETAHIIASLPHRFIPLFKQILSDRNTLSFILEEFKSDEEVIQSFCKYKTLLRNENVLETAEALFNELNSIDLTHIFISHKKLETISSALCDHWDTLRNALYERRISELTGKITKSAKEKVQRSLKHEDINLQEIISAAGKELSEAFKQKTSEILSHAHAALDQPLPTTLKKQEEKEILKSQLDSLLGLYHLLDWFAVDESNEVDPEFSARLTGIKLEMEPSLSFYNKARNYATKKPYSVEKFKLNFQMPTLASGWDVNKEKNNGAILFVKNGLYYLGIMPKQKGRYKALSFEPTEKTSEGFDKMYYDYFPDAAKMIPKCSTQLKAVTAHFQTHTTPILLSNNFIEPLEITKEIYDLNNPEKEPKKFQTAYAKKTGDQKGYREALCKWIDFTRDFLSKYTKTTSIDLSSLRPSSQYKDLGEYYAELNPLLYHISFQRIAEKEIMDAVETGKLYLFQIYNKDFAKGHHGKPNLHTLYWTGLFSPENLAKTSIKLNGQAELFYRPKSRMKRMAHRLGEKMLNKKLKDQKTPIPDTLYQELYDYVNHRLSHDLSDEARALLPNVITKEVSHEIIKDRRFTSDKFFFHVPITLNYQAANSPSKFNQRVNAYLKEHPETPIIGIDRGERNLIYITVIDSTGKILEQRSLNTIQQFDYQKKLDNREKERVAARQAWSVVGTIKDLKQGYLSQVIHEIVDLMIHYQAVVVLENLNFGFKSKRTGIAEKAVYQQFEKMLIDKLNCLVLKDYPAEKVGGVLNPYQLTDQFTSFAKMGTQSGFLFYVPAPYTSKIDPLTGFVDPFVWKTIKNHESRKHFLEGFDFLHYDVKTGDFILHFKMNRNLSFQRGLPGFMPAWDIVFEKNETQFDAKGTPFIAGKRIVPVIENHRFTGRYRDLYPANELIALLEEKGIVFRDGSNILPKLLENDDSHAIDTMVALIRSVLQMRNSNAATGEDYINSPVRDLNGVCFDSRFQNPEWPMDADANGAYHIALKGQLLLNHLKESKDLKLQNGISNQDWLAYIQELRNKRPAATKKAGQAKKKKG

SEQ ID NO: 1001 - protein, 1333 aa, synthetic construct
  REGION 1..1333: note = His-AsCpf1-sNLS-sNLS
MKHHHHHHMTQFEGFTNLYQVSKTLRFELIPQGKTLKHIQEQGFIEEDKARNDHYKELKPIIDRIYKTYADQCLQLVQLDWENLSAAIDSYRKEKTEETRNALIEEQATYRNAIHDYFIGRTDNLTDAINKRHAEIYKGLFKAELFNGKVLKQLGTVTTTEHENALLRSFDKFTTYFSGFYENRKNVFSAEDISTAIPHRIVQDNFPKFKENCHIFTRLITAVPSLREHFENVKKAIGIFVSTSIEEVFSFPFYNQLLTQTQIDLYNQLLGGISREAGTEKIKGLNEVLNLAIQKNDETAHIIASLPHRFIPLFKQILSDRNTLSFILEEFKSDEEVIQSFCKYKTLLRNENVLETAEALFNELNSIDLTHIFISHKKLETISSALCDHWDTLRNALYERRISELTGKITKSAKEKVQRSLKHEDINLQEIISAAGKELSEAFKQKTSEILSHAHAALDQPLPTTLKKQEEKEILKSQLDSLLGLYHLLDWFAVDESNEVDPEFSARLTGIKLEMEPSLSFYNKARNYATKKPYSVEKFKLNFQMPTLASGWDVNKEKNNGAILFVKNGLYYLGIMPKQKGRYKALSFEPTEKTSEGFDKMYYDYFPDAAKMIPKCSTQLKAVTAHFQTHTTPILLSNNFIEPLEITKEIYDLNNPEKEPKKFQTAYAKKTGDQKGYREALCKWIDFTRDFLSKYTKTTSIDLSSLRPSSQYKDLGEYYAELNPLLYHISFQRIAEKEIMDAVETGKLYLFQIYNKDFAKGHHGKPNLHTLYWTGLFSPENLAKTSIKLNGQAELFYRPKSRMKRMAHRLGEKMLNKKLKDQKTPIPDTLYQELYDYVNHRLSHDLSDEARALLPNVITKEVSHEIIKDRRFTSDKFFFHVPITLNYQAANSPSKFNQRVNAYLKEHPETPIIGIDRGERNLIYITVIDSTGKILEQRSLNTIQQFDYQKKLDNREKERVAARQAWSVVGTIKDLKQGYLSQVIHEIVDLMIHYQAVVVLENLNFGFKSKRTGIAEKAVYQQFEKMLIDKLNCLVLKDYPAEKVGGVLNPYQLTDQFTSFAKMGTQSGFLFYVPAPYTSKIDPLTGFVDPFVWKTIKNHESRKHFLEGFDFLHYDVKTGDFILHFKMNRNLSFQRGLPGFMPAWDIVFEKNETQFDAKGTPFIAGKRIVPVIENHRFTGRYRDLYPANELIALLEEKGIVFRDGSNILPKLLENDDSHAIDTMVALIRSVLQMRNSNAATGEDYINSPVRDLNGVCFDSRFQNPEWPMDADANGAYHIALKGQLLLNHLKESKDLKLQNGISNQDWLAYIQELRNGSPKKKRKVGSPKKKRKV

SEQ ID NO: 1002 - RNA, 20 nt, synthetic construct
  misc_feature 1..20: note = HBG1-1 gRNA (OLI13620) targeting domain
  source 1..20: mol_type = other RNA
ccttgtcaaggctattggtc

SEQ ID NO: 1003 - DNA, 20 bp, synthetic construct
  misc_feature 1..20: note = HBG1-1 gRNA (OLI13620) targeting domain
  source 1..20: mol_type = other DNA
ccttgtcaaggctattggtc

SEQ ID NO: 1004 - RNA, 24 nt, synthetic construct
  misc_feature 1..24: note = HBG1-1 gRNA (OLI13620) targeting domain plus PAM
  source 1..24: mol_type = other RNA
tttgccttgtcaaggctattggtc

SEQ ID NO: 1005 - DNA, 24 bp, synthetic construct
  misc_feature 1..24: note = HBG1-1 gRNA (OLI13620) targeting domain plus PAM
  source 1..24: mol_type = other DNA
tttgccttgtcaaggctattggtc

SEQ ID NO: 1006 - protein, 16 aa, synthetic construct
  REGION 1..16: note = Nucleoplasmin NLS
KRPAATKKAGQAKKKK

SEQ ID NO: 1007 - protein, 7 aa, synthetic construct
  REGION 1..7: note = Simian Virus 40 NLS
PKKKRKV

SEQ ID NO: 1008 - protein, 1324 aa, synthetic construct
  REGION 1..1324: note = His-AsCpf1-sNLS
  REGION 3..8: note = MISC_FEATURE - His tag
  REGION 1318..1324: note = MISC_FEATURE - SV40 NLS
MKHHHHHHMTQFEGFTNLYQVSKTLRFELIPQGKTLKHIQEQGFIEEDKARNDHYKELKPIIDRIYKTYADQCLQLVQLDWENLSAAIDSYRKEKTEETRNALIEEQATYRNAIHDYFIGRTDNLTDAINKRHAEIYKGLFKAELFNGKVLKQLGTVTTTEHENALLRSFDKFTTYFSGFYENRKNVFSAEDISTAIPHRIVQDNFPKFKENCHIFTRLITAVPSLREHFENVKKAIGIFVSTSIEEVFSFPFYNQLLTQTQIDLYNQLLGGISREAGTEKIKGLNEVLNLAIQKNDETAHIIASLPHRFIPLFKQILSDRNTLSFILEEFKSDEEVIQSFCKYKTLLRNENVLETAEALFNELNSIDLTHIFISHKKLETISSALCDHWDTLRNALYERRISELTGKITKSAKEKVQRSLKHEDINLQEIISAAGKELSEAFKQKTSEILSHAHAALDQPLPTTLKKQEEKEILKSQLDSLLGLYHLLDWFAVDESNEVDPEFSARLTGIKLEMEPSLSFYNKARNYATKKPYSVEKFKLNFQMPTLASGWDVNKEKNNGAILFVKNGLYYLGIMPKQKGRYKALSFEPTEKTSEGFDKMYYDYFPDAAKMIPKCSTQLKAVTAHFQTHTTPILLSNNFIEPLEITKEIYDLNNPEKEPKKFQTAYAKKTGDQKGYREALCKWIDFTRDFLSKYTKTTSIDLSSLRPSSQYKDLGEYYAELNPLLYHISFQRIAEKEIMDAVETGKLYLFQIYNKDFAKGHHGKPNLHTLYWTGLFSPENLAKTSIKLNGQAELFYRPKSRMKRMAHRLGEKMLNKKLKDQKTPIPDTLYQELYDYVNHRLSHDLSDEARALLPNVITKEVSHEIIKDRRFTSDKFFFHVPITLNYQAANSPSKFNQRVNAYLKEHPETPIIGIDRGERNLIYITVIDSTGKILEQRSLNTIQQFDYQKKLDNREKERVAARQAWSVVGTIKDLKQGYLSQVIHEIVDLMIHYQAVVVLENLNFGFKSKRTGIAEKAVYQQFEKMLIDKLNCLVLKDYPAEKVGGVLNPYQLTDQFTSFAKMGTQSGFLFYVPAPYTSKIDPLTGFVDPFVWKTIKNHESRKHFLEGFDFLHYDVKTGDFILHFKMNRNLSFQRGLPGFMPAWDIVFEKNETQFDAKGTPFIAGKRIVPVIENHRFTGRYRDLYPANELIALLEEKGIVFRDGSNILPKLLENDDSHAIDTMVALIRSVLQMRNSNAATGEDYINSPVRDLNGVCFDSRFQNPEWPMDADANGAYHIALKGQLLLNHLKESKDLKLQNGISNQDWLAYIQELRNGSPKKKRKV

SEQ ID NO: 1009 - protein, 1326 aa, synthetic construct
  REGION 1..1326: note = His-sNLS-AsCpf1
  REGION 3..8: note = MISC_FEATURE - His tag
  REGION 11..17: note = MISC_FEATURE - SV40 NLS
MKHHHHHHGSPKKKRKVGSMTQFEGFTNLYQVSKTLRFELIPQGKTLKHIQEQGFIEEDKARNDHYKELKPIIDRIYKTYADQCLQLVQLDWENLSAAIDSYRKEKTEETRNALIEEQATYRNAIHDYFIGRTDNLTDAINKRHAEIYKGLFKAELFNGKVLKQLGTVTTTEHENALLRSFDKFTTYFSGFYENRKNVFSAEDISTAIPHRIVQDNFPKFKENCHIFTRLITAVPSLREHFENVKKAIGIFVSTSIEEVFSFPFYNQLLTQTQIDLYNQLLGGISREAGTEKIKGLNEVLNLAIQKNDETAHIIASLPHRFIPLFKQILSDRNTLSFILEEFKSDEEVIQSFCKYKTLLRNENVLETAEALFNELNSIDLTHIFISHKKLETISSALCDHWDTLRNALYERRISELTGKITKSAKEKVQRSLKHEDINLQEIISAAGKELSEAFKQKTSEILSHAHAALDQPLPTTLKKQEEKEILKSQLDSLLGLYHLLDWFAVDESNEVDPEFSARLTGIKLEMEPSLSFYNKARNYATKKPYSVEKFKLNFQMPTLASGWDVNKEKNNGAILFVKNGLYYLGIMPKQKGRYKALSFEPTEKTSEGFDKMYYDYFPDAAKMIPKCSTQLKAVTAHFQTHTTPILLSNNFIEPLEITKEIYDLNNPEKEPKKFQTAYAKKTGDQKGYREALCKWIDFTRDFLSKYTKTTSIDLSSLRPSSQYKDLGEYYAELNPLLYHISFQRIAEKEIMDAVETGKLYLFQIYNKDFAKGHHGKPNLHTLYWTGLFSPENLAKTSIKLNGQAELFYRPKSRMKRMAHRLGEKMLNKKLKDQKTPIPDTLYQELYDYVNHRLSHDLSDEARALLPNVITKEVSHEIIKDRRFTSDKFFFHVPITLNYQAANSPSKFNQRVNAYLKEHPETPIIGIDRGERNLIYITVIDSTGKILEQRSLNTIQQFDYQKKLDNREKERVAARQAWSVVGTIKDLKQGYLSQVIHEIVDLMIHYQAVVVLENLNFGFKSKRTGIAEKAVYQQFEKMLIDKLNCLVLKDYPAEKVGGVLNPYQLTDQFTSFAKMGTQSGFLFYVPAPYTSKIDPLTGFVDPFVWKTIKNHESRKHFLEGFDFLHYDVKTGDFILHFKMNRNLSFQRGLPGFMPAWDIVFEKNETQFDAKGTPFIAGKRIVPVIENHRFTGRYRDLYPANELIALLEEKGIVFRDGSNILPKLLENDDSHAIDTMVALIRSVLQMRNSNAATGEDYINSPVRDLNGVCFDSRFQNPEWPMDADANGAYHIALKGQLLLNHLKESKDLKLQNGISNQDWLAYIQELRN

SEQ ID NO: 1010 - protein, 1333 aa, synthetic construct
  REGION 1..1333: note = His-sNLS-sNLS-AsCpf1
  REGION 3..8: note = MISC_FEATURE - His tag
  REGION 11..17: note = MISC_FEATURE - SV40 NLS
  REGION 20..26: note = MISC_FEATURE - SV40 NLS
MKHHHHHHGSPKKKRKVGSPKKKRKVMTQFEGFTNLYQVSKTLRFELIPQGKTLKHIQEQGFIEEDKARNDHYKELKPIIDRIYKTYADQCLQLVQLDWENLSAAIDSYRKEKTEETRNALIEEQATYRNAIHDYFIGRTDNLTDAINKRHAEIYKGLFKAELFNGKVLKQLGTVTTTEHENALLRSFDKFTTYFSGFYENRKNVFSAEDISTAIPHRIVQDNFPKFKENCHIFTRLITAVPSLREHFENVKKAIGIFVSTSIEEVFSFPFYNQLLTQTQIDLYNQLLGGISREAGTEKIKGLNEVLNLAIQKNDETAHIIASLPHRFIPLFKQILSDRNTLSFILEEFKSDEEVIQSFCKYKTLLRNENVLETAEALFNELNSIDLTHIFISHKKLETISSALCDHWDTLRNALYERRISELTGKITKSAKEKVQRSLKHEDINLQEIISAAGKELSEAFKQKTSEILSHAHAALDQPLPTTLKKQEEKEILKSQLDSLLGLYHLLDWFAVDESNEVDPEFSARLTGIKLEMEPSLSFYNKARNYATKKPYSVEKFKLNFQMPTLASGWDVNKEKNNGAILFVKNGLYYLGIMPKQKGRYKALSFEPTEKTSEGFDKMYYDYFPDAAKMIPKCSTQLKAVTAHFQTHTTPILLSNNFIEPLEITKEIYDLNNPEKEPKKFQTAYAKKTGDQKGYREALCKWIDFTRDFLSKYTKTTSIDLSSLRPSSQYKDLGEYYAELNPLLYHISFQRIAEKEIMDAVETGKLYLFQIYNKDFAKGHHGKPNLHTLYWTGLFSPENLAKTSIKLNGQAELFYRPKSRMKRMAHRLGEKMLNKKLKDQKTPIPDTLYQELYDYVNHRLSHDLSDEARALLPNVITKEVSHEIIKDRRFTSDKFFFHVPITLNYQAANSPSKFNQRVNAYLKEHPETPIIGIDRGERNLIYITVIDSTGKILEQRSLNTIQQFDYQKKLDNREKERVAARQAWSVVGTIKDLKQGYLSQVIHEIVDLMIHYQAVVVLENLNFGFKSKRTGIAEKAVYQQFEKMLIDKLNCLVLKDYPAEKVGGVLNPYQLTDQFTSFAKMGTQSGFLFYVPAPYTSKIDPLTGFVDPFVWKTIKNHESRKHFLEGFDFLHYDVKTGDFILHFKMNRNLSFQRGLPGFMPAWDIVFEKNETQFDAKGTPFIAGKRIVPVIENHRFTGRYRDLYPANELIALLEEKGIVFRDGSNILPKLLENDDSHAIDTMVALIRSVLQMRNSNAATGEDYINSPVRDLNGVCFDSRFQNPEWPMDADANGAYHIALKGQLLLNHLKESKDLKLQNGISNQDWLAYIQELRN

SEQ ID NO: 1011 - protein, 1327 aa, synthetic construct
  REGION 1..1327: note = sNLS-sNLS-AsCpf1
  REGION 5..11: note = MISC_FEATURE - SV40 NLS
  REGION 14..20: note = MISC_FEATURE - SV40 NLS
MKGSPKKKRKVGSPKKKRKVMTQFEGFTNLYQVSKTLRFELIPQGKTLKHIQEQGFIEEDKARNDHYKELKPIIDRIYKTYADQCLQLVQLDWENLSAAIDSYRKEKTEETRNALIEEQATYRNAIHDYFIGRTDNLTDAINKRHAEIYKGLFKAELFNGKVLKQLGTVTTTEHENALLRSFDKFTTYFSGFYENRKNVFSAEDISTAIPHRIVQDNFPKFKENCHIFTRLITAVPSLREHFENVKKAIGIFVSTSIEEVFSFPFYNQLLTQTQIDLYNQLLGGISREAGTEKIKGLNEVLNLAIQKNDETAHIIASLPHRFIPLFKQILSDRNTLSFILEEFKSDEEVIQSFCKYKTLLRNENVLETAEALFNELNSIDLTHIFISHKKLETISSALCDHWDTLRNALYERRISELTGKITKSAKEKVQRSLKHEDINLQEIISAAGKELSEAFKQKTSEILSHAHAALDQPLPTTLKKQEEKEILKSQLDSLLGLYHLLDWFAVDESNEVDPEFSARLTGIKLEMEPSLSFYNKARNYATKKPYSVEKFKLNFQMPTLASGWDVNKEKNNGAILFVKNGLYYLGIMPKQKGRYKALSFEPTEKTSEGFDKMYYDYFPDAAKMIPKCSTQLKAVTAHFQTHTTPILLSNNFIEPLEITKEIYDLNNPEKEPKKFQTAYAKKTGDQKGYREALCKWIDFTRDFLSKYTKTTSIDLSSLRPSSQYKDLGEYYAELNPLLYHISFQRIAEKEIMDAVETGKLYLFQIYNKDFAKGHHGKPNLHTLYWTGLFSPENLAKTSIKLNGQAELFYRPKSRMKRMAHRLGEKMLNKKLKDQKTPIPDTLYQELYDYVNHRLSHDLSDEARALLPNVITKEVSHEIIKDRRFTSDKFFFHVPITLNYQAANSPSKFNQRVNAYLKEHPETPIIGIDRGERNLIYITVIDSTGKILEQRSLNTIQQFDYQKKLDNREKERVAARQAWSVVGTIKDLKQGYLSQVIHEIVDLMIHYQAVVVLENLNFGFKSKRTGIAEKAVYQQFEKMLIDKLNCLVLKDYPAEKVGGVLNPYQLTDQFTSFAKMGTQSGFLFYVPAPYTSKIDPLTGFVDPFVWKTIKNHESRKHFLEGFDFLHYDVKTGDFILHFKMNRNLSFQRGLPGFMPAWDIVFEKNETQFDAKGTPFIAGKRIVPVIENHRFTGRYRDLYPANELIALLEEKGIVFRDGSNILPKLLENDDSHAIDTMVALIRSVLQMRNSNAATGEDYINSPVRDLNGVCFDSRFQNPEWPMDADANGAYHIALKGQLLLNHLKESKDLKLQNGISNQDWLAYIQELRN

SEQ ID NO: 1012 - protein, 1332 aa, synthetic construct
  REGION 1..1332: note = His-sNLS-AsCpf1-sNLS
  REGION 3..8: note = MISC_FEATURE - His tag
  REGION 10..16: note = MISC_FEATURE - SV40 NLS
  REGION 1325..1331: note = MISC_FEATURE - SV40 NLS
MKHHHHHHMPKKKRKVMTQFEGFTNLYQVSKTLRFELIPQGKTLKHIQEQGFIEEDKARNDHYKELKPIIDRIYKTYADQCLQLVQLDWENLSAAIDSYRKEKTEETRNALIEEQATYRNAIHDYFIGRTDNLTDAINKRHAEIYKGLFKAELFNGKVLKQLGTVTTTEHENALLRSFDKFTTYFSGFYENRKNVFSAEDISTAIPHRIVQDNFPKFKENCHIFTRLITAVPSLREHFENVKKAIGIFVSTSIEEVFSFPFYNQLLTQTQIDLYNQLLGGISREAGTEKIKGLNEVLNLAIQKNDETAHIIASLPHRFIPLFKQILSDRNTLSFILEEFKSDEEVIQSFCKYKTLLRNENVLETAEALFNELNSIDLTHIFISHKKLETISSALCDHWDTLRNALYERRISELTGKITKSAKEKVQRSLKHEDINLQEIISAAGKELSEAFKQKTSEILSHAHAALDQPLPTTLKKQEEKEILKSQLDSLLGLYHLLDWFAVDESNEVDPEFSARLTGIKLEMEPSLSFYNKARNYATKKPYSVEKFKLNFQMPTLASGWDVNKEKNNGAILFVKNGLYYLGIMPKQKGRYKALSFEPTEKTSEGFDKMYYDYFPDAAKMIPKCSTQLKAVTAHFQTHTTPILLSNNFIEPLEITKEIYDLNNPEKEPKKFQTAYAKKTGDQKGYREALCKWIDFTRDFLSKYTKTTSIDLSSLRPSSQYKDLGEYYAELNPLLYHISFQRIAEKEIMDAVETGKLYLFQIYNKDFAKGHHGKPNLHTLYWTGLFSPENLAKTSIKLNGQAELFYRPKSRMKRMAHRLGEKMLNKKLKDQKTPIPDTLYQELYDYVNHRLSHDLSDEARALLPNVITKEVSHEIIKDRRFTSDKFFFHVPITLNYQAANSPSKFNQRVNAYLKEHPETPIIGIDRGERNLIYITVIDSTGKILEQRSLNTIQQFDYQKKLDNREKERVAARQAWSVVGTIKDLKQGYLSQVIHEIVDLMIHYQAVVVLENLNFGFKSKRTGIAEKAVYQQFEKMLIDKLNCLVLKDYPAEKVGGVLNPYQLTDQFTSFAKMGTQSGFLFYVPAPYTSKIDPLTGFVDPFVWKTIKNHESRKHFLEGFDFLHYDVKTGDFILHFKMNRNLSFQRGLPGFMPAWDIVFEKNETQFDAKGTPFIAGKRIVPVIENHRFTGRYRDLYPANELIALLEEKGIVFRDGSNILPKLLENDDSHAIDTMVALIRSVLQMRNSNAATGEDYINSPVRDLNGVCFDSRFQNPEWPMDADANGAYHIALKGQLLLNHLKESKDLKLQNGISNQDWLAYIQELRNGPKKKRKVG

SEQ ID NO: 1013 - protein, 1352 aa, synthetic construct
  REGION 1..1352: note = His-sNLS-sNLS-AsCpf1-sNLS-sNLS
  REGION 3..8: note = MISC_FEATURE - His tag
  REGION 11..17: note = MISC_FEATURE - SV40 NLS
  REGION 20..26: note = MISC_FEATURE - SV40 NLS
  REGION 1337..1343: note = MISC_FEATURE - SV40 NLS
  REGION 1346..1352: note = MISC_FEATURE - SV40 NLS
MGHHHHHHGSPKKKRKVGSPKKKRKVGSTQFEGFTNLYQVSKTLRFELIPQGKTLKHIQEQGFIEEDKARNDHYKELKPIIDRIYKTYADQCLQLVQLDWENLSAAIDSYRKEKTEETRNALIEEQATYRNAIHDYFIGRTDNLTDAINKRHAEIYKGLFKAELFNGKVLKQLGTVTTTEHENALLRSFDKFTTYFSGFYENRKNVFSAEDISTAIPHRIVQDNFPKFKENCHIFTRLITAVPSLREHFENVKKAIGIFVSTSIEEVFSFPFYNQLLTQTQIDLYNQLLGGISREAGTEKIKGLNEVLNLAIQKNDETAHIIASLPHRFIPLFKQILSDRNTLSFILEEFKSDEEVIQSFCKYKTLLRNENVLETAEALFNELNSIDLTHIFISHKKLETISSALCDHWDTLRNALYERRISELTGKITKSAKEKVQRSLKHEDINLQEIISAAGKELSEAFKQKTSEILSHAHAALDQPLPTTLKKQEEKEILKSQLDSLLGLYHLLDWFAVDESNEVDPEFSARLTGIKLEMEPSLSFYNKARNYATKKPYSVEKFKLNFQMPTLASGWDVNKEKNNGAILFVKNGLYYLGIMPKQKGRYKALSFEPTEKTSEGFDKMYYDYFPDAAKMIPKCSTQLKAVTAHFQTHTTPILLSNNFIEPLEITKEIYDLNNPEKEPKKFQTAYAKKTGDQKGYREALCKWIDFTRDFLSKYTKTTSIDLSSLRPSSQYKDLGEYYAELNPLLYHISFQRIAEKEIMDAVETGKLYLFQIYNKDFAKGHHGKPNLHTLYWTGLFSPENLAKTSIKLNGQAELFYRPKSRMKRMAARLGEKMLNKKLKDQKTPIPDTLYQELYDYVNHRLSHDLSDEARALLPNVITKEVSHEIIKDRRFTSDKFFFHVPITLNYQAANSPSKFNQRVNAYLKEHPETPIIGIDRGERNLIYITVIDSTGKILEQRSLNTIQQFDYQKKLDNREKERVAARQAWSVVGTIKDLKQGYLSQVIHEIVDLMIHYQAVVVLENLNFGFKSKRTGIAEKAVYQQFEKMLIDKLNCLVLKDYPAEKVGGVLNPYQLTDQFTSFAKMGTQSGFLFYVPAPYTSKIDPLTGFVDPFVWKTIKNHESRKHFLEGFDFLHYDVKTGDFILHFKMNRNLSFQRGLPGFMPAWDIVFEKNETQFDAKGTPFIAGKRIVPVIENHRFTGRYRDLYPANELIALLEEKGIVFRDGSNILPKLLENDDSHAIDTMVALIRSVLQMRNSNAATGEDYINSPVRDLNGVCFDSRFQNPEWPMDADANGAYHIALKGQLLLNHLKESKDLKLQNGISNQDWLAYIQELRNGSPKKKRKVGSPKKKRKV

SEQ ID NO: 1014 - protein, 1332 aa, synthetic construct
  REGION 1..1332: note = His-AsCpf1-nNLS Cys-less
  REGION 3..8: note = MISC_FEATURE - His tag
  REGION 1316..1331: note = MISC_FEATURE - Nucleoplasmin NLS
MKHHHHHHMTQFEGFTNLYQVSKTLRFELIPQGKTLKHIQEQGFIEEDKARNDHYKELKPIIDRIYKTYADQSLQLVQLDWENLSAAIDSYRKEKTEETRNALIEEQATYRNAIHDYFIGRTDNLTDAINKRHAEIYKGLFKAELFNGKVLKQLGTVTTTEHENALLRSFDKFTTYFSGFYENRKNVFSAEDISTAIPHRIVQDNFPKFKENSHIFTRLITAVPSLREHFENVKKAIGIFVSTSIEEVFSFPFYNQLLTQTQIDLYNQLLGGISREAGTEKIKGLNEVLNLAIQKNDETAHIIASLPHRFIPLFKQILSDRNTLSFILEEFKSDEEVIQSFSKYKTLLRNENVLETAEALFNELNSIDLTHIFISHKKLETISSALSDHWDTLRNALYERRISELTGKITKSAKEKVQRSLKHEDINLQEIISAAGKELSEAFKQKTSEILSHAHAALDQPLPTTLKKQEEKEILKSQLDSLLGLYHLLDWFAVDESNEVDPEFSARLTGIKLEMEPSLSFYNKARNYATKKPYSVEKFKLNFQMPTLASGWDVNKEKNNGAILFVKNGLYYLGIMPKQKGRYKALSFEPTEKTSEGFDKMYYDYFPDAAKMIPKSSTQLKAVTAHFQTHTTPILLSNNFIEPLEITKEIYDLNNPEKEPKKFQTAYAKKTGDQKGYREALSKWIDFTRDFLSKYTKTTSIDLSSLRPSSQYKDLGEYYAELNPLLYHISFQRIAEKEIMDAVETGKLYLFQIYNKDFAKGHHGKPNLHTLYWTGLFSPENLAKTSIKLNGQAELFYRPKSRMKRMAHRLGEKMLNKKLKDQKTPIPDTLYQELYDYVNHRLSHDLSDEARALLPNVITKEVSHEIIKDRRFTSDKFFFHVPITLNYQAANSPSKFNQRVNAYLKEHPETPIIGIDRGERNLIYITVIDSTGKILEQRSLNTIQQFDYQKKLDNREKERVAARQAWSVVGTIKDLKQGYLSQVIHEIVDLMIHYQAVVVLENLNFGFKSKRTGIAEKAVYQQFEKMLIDKLNSLVLKDYPAEKVGGVLNPYQLTDQFTSFAKMGTQSGFLFYVPAPYTSKIDPLTGFVDPFVWKTIKNHESRKHFLEGFDFLHYDVKTGDFILHFKMNRNLSFQRGLPGFMPAWDIVFEKNETQFDAKGTPFIAGKRIVPVIENHRFTGRYRDLYPANELIALLEEKGIVFRDGSNILPKLLENDDSHAIDTMVALIRSVLQMRNSNAATGEDYINSPVRDLNGVSFDSRFQNPEWPMDADANGAYHIALKGQLLLNHLKESKDLKLQNGISNQDWLAYIQELRNKRPAATKKAGQAKKKKG

SEQ ID NO: 1015 - protein, 1332 aa, synthetic construct
  REGION 1..1332: note = His-AsCpf1-nNLS Cys-low
  REGION 3..8: note = MISC_FEATURE - His tag
  REGION 1316..1331: note = MISC_FEATURE - Nucleoplasmin NLS
MKHHHHHHMTQFEGFTNLYQVSKTLRFELIPQGKTLKHIQEQGFIEEDKARNDHYKELKPIIDRIYKTYADQCLQLVQLDWENLSAAIDSYRKEKTEETRNALIEEQATYRNAIHDYFIGRTDNLTDAINKRHAEIYKGLFKAELFNGKVLKQLGTVTTTEHENALLRSFDKFTTYFSGFYENRKNVFSAEDISTAIPHRIVQDNFPKFKENCHIFTRLITAVPSLREHFENVKKAIGIFVSTSIEEVFSFPFYNQLLTQTQIDLYNQLLGGISREAGTEKIKGLNEVLNLAIQKNDETAHIIASLPHRFIPLFKQILSDRNTLSFILEEFKSDEEVIQSFSKYKTLLRNENVLETAEALFNELNSIDLTHIFISHKKLETISSALSDHWDTLRNALYERRISELTGKITKSAKEKVQRSLKHEDINLQEIISAAGKELSEAFKQKTSEILSHAHAALDQPLPTTLKKQEEKEILKSQLDSLLGLYHLLDWFAVDESNEVDPEFSARLTGIKLEMEPSLSFYNKARNYATKKPYSVEKFKLNFQMPTLASGWDVNKEKNNGAILFVKNGLYYLGIMPKQKGRYKALSFEPTEKTSEGFDKMYYDYFPDAAKMIPKCSTQLKAVTAHFQTHTTPILLSNNFIEPLEITKEIYDLNNPEKEPKKFQTAYAKKTGDQKGYREALSKWIDFTRDFLSKYTKTTSIDLSSLRPSSQYKDLGEYYAELNPLLYHISFQRIAEKEIMDAVETGKLYLFQIYNKDFAKGHHGKPNLHTLYWTGLFSPENLAKTSIKLNGQAELFYRPKSRMKRMAHRLGEKMLNKKLKDQKTPIPDTLYQELYDYVNHRLSHDLSDEARALLPNVITKEVSHEIIKDRRFTSDKFFFHVPITLNYQAANSPSKFNQRVNAYLKEHPETPIIGIDRGERNLIYITVIDSTGKILEQRSLNTIQQFDYQKKLDNREKERVAARQAWSVVGTIKDLKQGYLSQVIHEIVDLMIHYQAVVVLENLNFGFKSKRTGIAEKAVYQQFEKMLIDKLNCLVLKDYPAEKVGGVLNPYQLTDQFTSFAKMGTQSGFLFYVPAPYTSKIDPLTGFVDPFVWKTIKNHESRKHFLEGFDFLHYDVKTGDFILHFKMNRNLSFQRGLPGFMPAWDIVFEKNETQFDAKGTPFIAGKRIVPVIENHRFTGRYRDLYPANELIALLEEKGIVFRDGSNILPKLLENDDSHAIDTMVALIRSVLQMRNSNAATGEDYINSPVRDLNGVCFDSRFQNPEWPMDADANGAYHIALKGQLLLNHLKESKDLKLQNGISNQDWLAYIQELRNKRPAATKKAGQAKKKKG

SEQ ID NO: 1016 - protein, 1307 aa, Streptococcus mutans
MTQFEGFTNLYQVSKTLRFELIPQGKTLKHIQEQGFIEEDKARNDHYKELKPIIDRIYKTYADQCLQLVQLDWENLSAAIDSYRKEKTEETRNALIEEQATYRNAIHDYFIGRTDNLTDAINKRHAEIYKGLFKAELFNGKVLKQLGTVTTTEHENALLRSFDKFTTYFSGFYENRKNVFSAEDISTAIPHRIVQDNFPKFKENCHIFTRLITAVPSLREHFENVKKAIGIFVSTSIEEVFSFPFYNQLLTQTQIDLYNQLLGGISREAGTEKIKGLNEVLNLAIQKNDETAHIIASLPHRFIPLFKQILSDRNTLSFILEEFKSDEEVIQSFCKYKTLLRNENVLETAEALFNELNSIDLTHIFISHKKLETISSALCDHWDTLRNALYERRISELTGKITKSAKEKVQRSLKHEDINLQEIISAAGKELSEAFKQKTSEILSHAHAALDQPLPTTLKKQEEKEILKSQLDSLLGLYHLLDWFAVDESNEVDPEFSARLTGIKLEMEPSLSFYNKARNYATKKPYSVEKFKLNFQMPTLASGWDVNKEKNNGAILFVKNGLYYLGIMPKQKGRYKALSFEPTEKTSEGFDKMYYDYFPDAAKMIPKCSTQLKAVTAHFQTHTTPILLSNNFIEPLEITKEIYDLNNPEKEPKKFQTAYAKKTGDQKGYREALCKWIDFTRDFLSKYTKTTSIDLSSLRPSSQYKDLGEYYAELNPLLYHISFQRIAEKEIMDAVETGKLYLFQIYNKDFAKGHHGKPNLHTLYWTGLFSPENLAKTSIKLNGQAELFYRPKSRMKRMAHRLGEKMLNKKLKDQKTPIPDTLYQELYDYVNHRLSHDLSDEARALLPNVITKEVSHEIIKDRRFTSDKFFFHVPITLNYQAANSPSKFNQRVNAYLKEHPETPIIGIDRGERNLIYITVIDSTGKILEQRSLNTIQQFDYQKKLDNREKERVAARQAWSVVGTIKDLKQGYLSQVIHEIVDLMIHYQAVVVLENLNFGFKSKRTGIAEKAVYQQFEKMLIDKLNCLVLKDYPAEKVGGVLNPYQLTDQFTSFAKMGTQSGFLFYVPAPYTSKIDPLTGFVDPFVWKTIKNHESRKHFLEGFDFLHYDVKTGDFILHFKMNRNLSFQRGLPGFMPAWDIVFEKNETQFDAKGTPFIAGKRIVPVIENHRFTGRYRDLYPANELIALLEEKGIVFRDGSNILPKLLENDDSHAIDTMVALIRSVLQMRNSNAATGEDYINSPVRDLNGVCFDSRFQNPEWPMDADANGAYHIALKGQLLLNHLKESKDLKLQNGISNQDWLAYIQELRN

SEQ ID NO: 1017 - protein, 1228 aa, Streptococcus mutans
MSKLEKFTNCYSLSKTLRFKAIPVGKTQENIDNKRLLVEDEKRAEDYKGVKKLLDRYYLSFINDVLHSIKLKNLNNYISLFRKKTRTEKENKELENLEINLRKEIAKAFKGNEGYKSLFKKDIIETILPEFLDDKDEIALVNSFNGFTTAFTGFFDNRENMFSEEAKSTSIAFRCINENLTRYISNMDIFEKVDAIFDKHEVQEIKEKILNSDYDVEDFFEGEFFNFVLTQEGIDVYNAIIGGFVTESGEKIKGLNEYINLYNQKTKQKLPKFKPLYKQVLSDRESLSFYGEGYTSDEEVLEVFRNTLNKNSEIFSSIKKLEKLFKNFDEYSSAGIFVKNGPAISTISKDIFGEWNVIRDKWNAEYDDIHLKKKAVVTEKYEDDRRKSFKKIGSFSLEQLQEYADADLSVVEKLKEIIIQKVDEIYKVYGSSEKLFDADFVLEKSLKKNDAVVAIMKDLLDSVKSFENYIKAFFGEGKETNRDESFYGDFVLAYDILLKVDHIYDAIRNYVTQKPYSKDKFKLYFQNPQFMGGWDKDKETDYRATILRYGSKYYLAIMDKKYAKCLQKIDKDDVNGNYEKINYKLLPGPNKMLPKVFFSKKWMAYYNPSEDIQKIYKNGTFKKGDMFNLNDCHKLIDFFKDSISRYPKWSNAYDFNFSETEKYKDIAGFYREVEEQGYKVSFESASKKEVDKLVEEGKLYMFQIYNKDFSDKSHGTPNLHTMYFKLLFDENNHGQIRLSGGAELFMRRASLKKEELVVHPANSPIANKNPDNPKKTTTLSYDVYKDKRFSEDQYELHIPIAINKCPKNIFKINTEVRVLLKHDDNPYVIGIDRGERNLLYIVVVDGKGNIVEQYSLNEIINNFNGIRIKTDYHSLLDKKEKERFEARQNWTSIENIKELKAGYISQVVHKICELVEKYDAVIALEDLNSGFKNSRVKVEKQVYQKFEKMLIDKLNYMVDKKSNPCATGGALKGYQITNKFESFKSMSTQNGFIFYIPAWLTSKIDPSTGFVNLLKTKYTSIADSKKFISSFDRIMYVPEEDLFEFALDYKNFSRTDADYIKKWKLYSYGNRIRIFRNPKKNNVFDWEEVCLTSAYKELFNKYGINYQQGDIRALLCEQSDKAFYSSFMALMSLMLQMRNSITGRTDVDFLISPVKNSDGIFYDSRNYEAQENAILPKNADANGAYNIARKVLWAIGQFKKAEDEKLDKVKIAISNKEWLEYAQTSVKH

SEQ ID NO: 1018 - protein, 1206 aa, Streptococcus mutans
MYYESLTKQYPVSKTIRNELIPIGKTLDNIRQNNILESDVKRKQNYEHVKGILDEYHKQLINEALDNCTLPSLKIAAEIYLKNQKEVSDREDFNKTQDLLRKEVVEKLKAHENFTKIGKKDILDLLEKLPSISEDDYNALESFRNFYTYFTSYNKVRENLYSDKEKSSTVAYRLINENFPKFLDNVKSYRFVKTAGILADGLGEEEQDSLFIVETFNKTLTQDGIDTYNSQVGKINSSINLYNQKNQKANGFRKIPKMKMLYKQILSDREESFIDEFQSDEVLIDNVESYGSVLIESLKSSKVSAFFDALRESKGKNVYVKNDLAKTAMSNIVFENWRTFDDLLNQEYDLANENKKKDDKYFEKRQKELKKNKSYSLEHLCNLSEDSCNLIENYIHQISDDIENIIINNETFLRIVINEHDRSRKLAKNRKAVKAIKDFLDSIKVLERELKLINSSGQELEKDLIVYSAHEELLVELKQVDSLYNMTRNYLTKKPFSTEKVKLNFNRSTLLNGWDRNKETDNLGVLLLKDGKYYLGIMNTSANKAFVNPPVAKTEKVFKKVDYKLLPVPNQMLPKVFFAKSNIDFYNPSSEIYSNYKKGTHKKGNMFSLEDCHNLIDFFKESISKHEDWSKFGFKFSDTASYNDISEFYREVEKQGYKLTYTDIDETYINDLIERNELYLFQIYNKDFSMYSKGKLNLHTLYFMMLFDQRNIDDVVYKLNGEAEVFYRPASISEDELIIHKAGEEIKNKNPNRARTKETSTFSYDIVKDKRYSKDKFTLHIPITMNFGVDEVKRFNDAVNSAIRIDENVNVIGIDRGERNLLYVVVIDSKGNILEQISLNSIINKEYDIETDYHALLDEREGGRDKARKDWNTVENIRDLKAGYLSQVVNVVAKLVLKYNAIICLEDLNFGFKRGRQKVEKQVYQKFEKMLIDKLNYLVIDKSREQTSPKELGGALNALQLTSKFKSFKELGKQSGVIYYVPAYLTSKIDPTTGFANLFYMKCENVEKSKRFFDGFDFIRFNALENVFEFGFDYRSFTQRACGINSKWTVCTNGERIIKYRNPDKNNMFDEKVVVVTDEMKNLFEQYKIPYEDGRNVKDMIISNEEAEFYRRLYRLLQQTLQMRNSTSDGTRDYIISPVKNKREAYFNSELSDGSVPKDADANGAYNIARKGLWVLEQIRQKSEGEKINLAMTNAEWLEYAQTHLL

SEQ ID NO: 1019 - DNA, 4059 bp, Streptococcus mutans
  source 1..4059: mol_type = other DNA
atgacccagttcgagggcttcaccaacctgtaccaggtgagcaagaccctgcggttcgagctgatcccccagggcaagaccctgaagcacatccaggagcagggcttcatcgaggaggacaaggcccggaacgaccactacaaggagctgaagcccatcatcgaccggatctacaagacctacgccgaccagtgcctgcagctggtgcagctggactgggagaacctgagcgccgccatcgacagctaccggaaggagaagaccgaggagacccggaacgccctgatcgaggagcaggccacctaccggaacgccatccacgactacttcatcggccggaccgacaacctgaccgacgccatcaacaagcggcacgccgagatctacaagggcctgttcaaggccgagctgttcaacggcaaggtgctgaagcagctgggcaccgtgaccaccaccgagcacgagaacgccctgctgcggagcttcgacaagttcaccacctacttcagcggcttctacgagaaccggaagaacgtgttcagcgccgaggacatcagcaccgccatcccccaccggatcgtgcaggacaacttccccaagttcaaggagaactgccacatcttcacccggctgatcaccgccgtgcccagcctgcgggagcacttcgagaacgtgaagaaggccatcggcatcttcgtgagcaccagcatcgaggaggtgttcagcttccccttctacaaccagctgctgacccagacccagatcgacctgtacaaccagctgctgggcggcatcagccgggaggccggcaccgagaagatcaagggcctgaacgaggtgctgaacctggccatccagaagaacgacgagaccgcccacatcatcgccagcctgccccaccggttcatccccctgttcaagcagatcctgagcgaccggaacaccctgagcttcatcctggaggagttcaagagcgacgaggaggtgatccagagcttctgcaagtacaagaccctgctgcggaacgagaacgtgctggagaccgccgaggccctgttcaacgagctgaacagcatcgacctgacccacatcttcatcagccacaagaagctggagaccatcagcagcgccctgtgcgaccactgggacaccctgcggaacgccctgtacgagcggcggatcagcgagctgaccggcaagatcaccaagagcgccaaggagaaggtgcagcggagcctgaagcacgaggacatcaacctgcaggagatcatcagcgccgccggcaaggagctgagcgaggccttcaagcagaagaccagcgagatcctgagccacgcccacgccgccctggaccagcccctgcccaccaccctgaagaagcaggaggagaaggagatcctgaaaagccagctggacagcctgctgggcctgtaccacctgctggactggttcgccgtggacgagagcaacgaggtggaccccgagttcagcgcccggctgaccggcatcaagctggagatggagcccagcctgagcttctacaacaaggcccggaactacgccaccaagaagccctacagcgtggagaagttcaagctgaacttccagatgcccaccctggccagcggctgggacgtgaacaaggagaagaacaacggcgccatcctgttcgtgaagaacggcctgtactacctgggcatcatgcccaagcagaagggccggtacaaggccctgagcttcgagcccaccgagaagaccagcgagggcttcgacaagatgtactacgactacttccccgacgccgccaagatgatccccaagtgcagcacccagctgaaggccgtgaccgcccacttccagacccacaccacccccatcctgctgagcaacaacttcatcgagcccctggagatcaccaaggagatctacgacctgaacaaccccgagaaggagcccaagaagttccagaccgcctacgccaagaagaccggcgaccagaagggctaccgggaggccctgtgcaagtggatcgacttcacccgggacttcctgagcaagtacaccaagaccaccagcatcgacctgagcagcctgcggcccagcagccagtacaaggacctgggcgagtactacgccgagctgaaccccctgctgtaccacatcagcttccagcggatcgccgagaaggagatcatggacgccgtggagaccggcaagctgtacctgttccagatctacaacaaggacttcgccaagggccaccacggcaagcccaacctgcacaccctgtactggaccggcctgttcagccccgagaacctggccaagaccagcatcaagctgaacggccaggccgagctgttctaccggcccaagagccggatgaagcggatggcccaccggctgggcgagaagatgctgaacaagaagctgaaggaccagaagacccccatccccgacaccctgtaccaggagctgtacgactacgtgaaccaccggctgagccacgacctgagcgacgaggcccgggccctgctgcccaacgtgatcaccaaggaggtgagccacgagatcatcaaggaccggcggttcaccagcgacaagttcttcttccacgtgcccatcaccctgaactaccaggccgccaacagccccagcaagttcaaccagcgggtgaacgcctacctgaaggagcaccccgagacccccatcatcggcatcgaccggggcgagcggaacctgatctacatcaccgtgatcgacagcaccggcaagatcctggagcagcggagcctgaacaccatccagcagttcgactaccagaagaagctggacaaccgggagaaggagcgggtggccgcccggcaggcctggagcgtggtgggcaccatcaaggacctgaagcagggctacctgagccaggtgatccacgagatcgtggacctgatgatccactaccaggccgtggtggtgctggagaacctgaacttcggcttcaagagcaagcggaccggcatcgccgagaaggccgtgtaccagcagttcgagaagatgctgatcgacaagctgaactgcctggtgctgaaggactaccccgccgagaaggtgggcggcgtgctgaacccctaccagctgaccgaccagttcaccagcttcgccaagatgggcacccagagcggcttcctgttctacgtgcccgccccctacaccagcaagatcgaccccctgaccggcttcgtggaccccttcgtgtggaagaccatcaagaaccacgagagccggaagcacttcctggagggcttcgacttcctgcactacgacgtgaagaccggcgacttcatcctgcacttcaagatgaaccggaacctgagcttccagcggggcctgcccggcttcatgcccgcctgggacatcgtgttcgagaagaacgagacccagttcgacgccaagggcacccccttcatcgccggcaagcggatcgtgcccgtgatcgagaaccaccggttcaccggccggtaccgggacctgtaccccgccaacgagctgatcgccctgctggaggagaagggcatcgtgttccgggacggcagcaacatcctgcccaagctgctggagaacgacgacagccacgccatcgacaccatggtggccctgatccggagcgtgctgcagatgcggaacagcaacgccgccaccggcgaggactacatcaacagccccgtgcgggacctgaacggcgtgtgcttcgacagccggttccagaaccccgagtggcccatggacgccgacgccaacggcgcctaccacatcgccctgaagggccagctgctgctgaaccacctgaaggagagcaaggacctgaagctgcagaacggcatcagcaaccaggactggctggcctacatccaggagctgcggaacaagcggcccgccgccaccaagaaggccggccaggccaagaagaagaagggcagctacccctacgacgtgcccgactacgcctacccctacgacgtgcccgactacgcctacccctacgacgtgcccgactacgcctga

SEQ ID NO: 1020 - DNA, 3822 bp, Streptococcus mutans
  source 1..3822: mol_type = other DNA
atgagcaagctggagaagttcaccaactgctacagcctgagcaagaccctgcggttcaaggccatccccgtgggcaagacccaggagaacatcgacaacaagcggctgctggtggaggacgagaagcgggccgaggactacaagggcgtgaagaagctgctggaccggtactacctgagcttcatcaacgacgtgctgcacagcatcaagctgaagaacctgaacaactacatcagcctgttccggaagaagacccggaccgagaaggagaacaaggagctggagaacctggagatcaacctgcggaaggagatcgccaaggccttcaagggcaacgagggctacaagagcctgttcaagaaggacatcatcgagaccatcctgcccgagttcctggacgacaaggacgagatcgccctggtgaacagcttcaacggcttcaccaccgccttcaccggcttcttcgacaaccgggagaacatgttcagcgaggaggccaagagcaccagcatcgccttccggtgcatcaacgagaacctgacccggtacatcagcaacatggacatcttcgagaaggtggacgccatcttcgacaagcacgaggtgcaggagatcaaggagaagatcctgaacagcgactacgacgtggaggacttcttcgagggcgagttcttcaacttcgtgctgacccaggagggcatcgacgtgtacaacgccatcatcggcggcttcgtgaccgagagcggcgagaagatcaagggcctgaacgagtacatcaacctgtacaaccagaagaccaagcagaagctgcccaagttcaagcccctgtacaagcaggtgctgagcgaccgggagagcctgagcttctacggcgagggctacaccagcgacgaggaggtgctggaggtgttccggaacaccctgaacaagaacagcgagatcttcagcagcatcaagaagctggagaagctgttcaagaacttcgacgagtacagcagcgccggcatcttcgtgaagaacggccccgccatcagcaccatcagcaaggacatcttcggcgagtggaacgtgatccgggacaagtggaacgccgagtacgacgacatccacctgaagaagaaggccgtggtgaccgagaagtacgaggacgaccggcggaaaagcttcaagaagatcggcagcttcagcctggagcagctgcaggagtacgccgacgccgacctgagcgtggtggagaagctgaaggagatcatcatccagaaggtggacgagatctacaaggtgtacggcagcagcgagaagctgttcgacgccgacttcgtgctggagaaaagcctgaagaagaacgacgccgtggtggccatcatgaaggacctgctggacagcgtgaaaagcttcgagaactacatcaaggccttcttcggcgagggcaaggagaccaaccgggacgagagcttctacggcgacttcgtgctggcctacgacatcctgctgaaggtggaccacatctacgacgccatccggaactacgtgacccagaagccctacagcaaggacaagttcaagctgtacttccagaacccccagttcatgggcggctgggacaaggacaaggagaccgactaccgggccaccatcctgcggtacggcagcaagtactacctggccatcatggacaagaagtacgccaagtgcctgcagaagatcgacaaggacgacgtgaacggcaactacgagaagatcaactacaagctgctgcccggccccaacaagatgctgcccaaggtgttcttcagcaagaagtggatggcctactacaaccccagcgaggacatccagaagatctacaagaacggcaccttcaagaagggcgacatgttcaacctgaacgactgccacaagctgatcgacttcttcaaggacagcatcagccggtaccccaagtggagcaacgcctacgacttcaacttcagcgagaccgagaagtacaaggacatcgccggcttctaccgggaggtggaggagcagggctacaaggtgagcttcgagagcgccagcaagaaggaggtggacaagctggtggaggagggcaagctgtacatgttccagatctacaacaaggacttcagcgacaagagccacggcacccccaacctgcacaccatgtacttcaagctgctgttcgacgagaacaaccacggccagatccggctgagcggcggcgccgagctgttcatgcggcgggccagcctgaagaaggaggagctggtggtgcaccccgccaacagccccatcgccaacaagaaccccgacaaccccaagaagaccaccaccctgagctacgacgtgtacaaggacaagcggttcagcgaggaccagtacgagctgcacatccccatcgccatcaacaagtgccccaagaacatcttcaagatcaacaccgaggtgcgggtgctgctgaagcacgacgacaacccctacgtgatcggcatcgaccggggcgagcggaacctgctgtacatcgtggtggtggacggcaagggcaacatcgtggagcagtacagcctgaacgagatcatcaacaacttcaacggcatccggatcaagaccgactaccacagcctgctggacaagaaggagaaggagcggttcgaggcccggcagaactggaccagcatcgagaacatcaaggagctgaaggccggctacatcagccaggtggtgcacaagatctgcgagctggtggagaagtacgacgccgtgatcgccctggaggacctgaacagcggcttcaagaacagccgggtgaaggtggagaagcaggtgtaccagaagttcgagaagatgctgatcgacaagctgaactacatggtggacaagaaaagcaacccctgcgccaccggcggcgccctgaagggctaccagatcaccaacaagttcgagagcttcaagagcatgagcacccagaacggcttcatcttctacatccccgcctggctgaccagcaagatcgaccccagcaccggcttcgtgaacctgctgaagaccaagtacaccagcatcgccgacagcaagaagttcatcagcagcttcgaccggatcatgtacgtgcccgaggaggacctgttcgagttcgccctggactacaagaacttcagccggaccgacgccgactacatcaagaagtggaagctgtacagctacggcaaccggatccggatcttccggaaccccaagaagaacaacgtgttcgactgggaggaggtgtgcctgaccagcgcctacaaggagctgttcaacaagtacggcatcaactaccagcagggcgacatccgggccctgctgtgcgagcagagcgacaaggccttctacagcagcttcatggccctgatgagcctgatgctgcagatgcggaacagcatcaccggccggaccgacgtggacttcctgatcagccccgtgaagaacagcgacggcatcttctacgacagccggaactacgaggcccaggagaacgccatcctgcccaagaacgccgacgccaacggcgcctacaacatcgcccggaaggtgctgtgggccatcggccagttcaagaaggccgaggacgagaagctggacaaggtgaagatcgccatcagcaacaaggagtggctggagtacgcccagaccagcgtgaagcacaagcggcccgccgccaccaagaaggccggccaggccaagaagaagaagggcagctacccctacgacgtgcccgactacgcctacccctacgacgtgcccgactacgcctacccctacgacgtgcccgactacgcctga

SEQ ID NO: 1021 - DNA, 3756 bp, Streptococcus mutans
  source 1..3756: mol_type = other DNA
atgtactacgagagcctgaccaagcagtaccccgtgagcaagaccatccggaacgagctgatccccatcggcaagaccctggacaacatccggcagaacaacatcctggagagcgacgtgaagcggaagcagaactacgagcacgtgaagggcatcctggacgagtaccacaagcagctgatcaacgaggccctggacaactgcaccctgcccagcctgaagatcgccgccgagatctacctgaagaaccagaaggaggtgagcgaccgggaggacttcaacaagacccaggacctgctgcggaaggaggtggtggagaagctgaaggcccacgagaacttcaccaagatcggcaagaaggacatcctggacctgctggagaagctgcccagcatcagcgaggacgactacaacgccctggagagcttccggaacttctacacctacttcaccagctacaacaaggtgcgggagaacctgtacagcgacaaggagaaaagcagcaccgtggcctaccggctgatcaacgagaacttccccaagttcctggacaacgtgaaaagctaccggttcgtgaagaccgccggcatcctggccgacggcctgggcgaggaggagcaggacagcctgttcatcgtggagaccttcaacaagaccctgacccaggacggcatcgacacctacaacagccaggtgggcaagatcaacagcagcatcaacctgtacaaccagaagaaccagaaggccaacggcttccggaagatccccaagatgaagatgctgtacaagcagatcctgagcgaccgggaggagagcttcatcgacgagttccagagcgacgaggtgctgatcgacaacgtggagagctacggcagcgtgctgatcgagagcctgaaaagcagcaaggtgagcgccttcttcgacgccctgcgggagagcaagggcaagaacgtgtacgtgaagaacgacctggccaagaccgccatgagcaacatcgtgttcgagaactggcggaccttcgacgacctgctgaaccaggagtacgacctggccaacgagaacaagaagaaggacgacaagtacttcgagaagcggcagaaggagctgaagaagaacaagagctacagcctggagcacctgtgcaacctgagcgaggacagctgcaacctgatcgagaactacatccaccagatcagcgacgacatcgagaacatcatcatcaacaacgagaccttcctgcggatcgtgatcaacgagcacgaccggagccggaagctggccaagaaccggaaggccgtgaaggccatcaaggacttcctggacagcatcaaggtgctggagcgggagctgaagctgatcaacagcagcggccaggagctggagaaggacctgatcgtgtacagcgcccacgaggagctgctggtggagctgaagcaggtggacagcctgtacaacatgacccggaactacctgaccaagaagcccttcagcaccgagaaggtgaagctgaacttcaaccggagcaccctgctgaacggctgggaccggaacaaggagaccgacaacctgggcgtgctgctgctgaaggacggcaagtactacctgggcatcatgaacaccagcgccaacaaggccttcgtgaacccccccgtggccaagaccgagaaggtgttcaagaaggtggactacaagctgctgcccgtgcccaaccagatgctgcccaaggtgttcttcgccaagagcaacatcgacttctacaaccccagcagcgagatctacagcaactacaagaagggcacccacaagaagggcaacatgttcagcctggaggactgccacaacctgatcgacttcttcaaggagagcatcagcaagcacgaggactggagcaagttcggcttcaagttcagcgacaccgccagctacaacgacatcagcgagttctaccgggaggtggagaagcagggctacaagctgacctacaccgacatcgacgagacctacatcaacgacctgatcgagcggaacgagctgtacctgttccagatctacaacaaggacttcagcatgtacagcaagggcaagctgaacctgcacaccctgtacttcatgatgctgttcgaccagcggaacatcgacgacgtggtgtacaagctgaacggcgaggccgaggtgttctaccggcccgccagcatcagcgaggacgagctgatcatccacaaggccggcgaggagatcaagaacaagaaccccaaccgggcccggaccaaggagaccagcaccttcagctacgacatcgtgaaggacaagcggtacagcaaggacaagttcaccctgcacatccccatcaccatgaacttcggcgtggacgaggtgaagcggttcaacgacgccgtgaacagcgccatccggatcgacgagaacgtgaacgtgatcggcatcgaccggggcgagcggaacctgctgtacgtggtggtgatcgacagcaagggcaacatcctggagcagatcagcctgaacagcatcatcaacaaggagtacgacatcgagaccgactaccacgccctgctggacgagcgggagggcggccgggacaaggcccggaaggactggaacaccgtggagaacatccgggacctgaaggccggctacctgagccaggtggtgaacgtggtggccaagctggtgctgaagtacaacgccatcatctgcctggaggacctgaacttcggcttcaagcggggccggcagaaggtggagaagcaggtgtaccagaagttcgagaagatgctgatcgacaagctgaactacctggtgatcgacaagagccgggagcagaccagccccaaggagctgggcggcgccctgaacgccctgcagctgaccagcaagttcaagagcttcaaggagctgggcaagcagagcggcgtgatctactacgtgcccgcctacctgaccagcaagatcgaccccaccaccggcttcgccaacctgttctacatgaagtgcgagaacgtggagaaaagcaagcggttcttcgacggcttcgacttcatccggttcaacgccctggagaacgtgttcgagttcggcttcgactaccggagcttcacccagcgggcctgcggcatcaacagcaagtggaccgtgtgcaccaacggcgagcggatcatcaagtaccggaaccccgacaagaacaacatgttcgacgagaaggtggtggtggtgaccgacgagatgaagaacctgttcgagcagtacaagatcccctacgaggacggccggaacgtgaaggacatgatcatcagcaacgaggaggccgagttctaccggcggctgtaccggctgctgcagcagaccctgcagatgcggaacagcaccagcgacggcacccgggactacatcatcagccccgtgaagaacaagcgggaggcctacttcaacagcgagctgagcgacggcagcgtgcccaaggacgccgacgccaacggcgcctacaacatcgcccggaagggcctgtgggtgctggagcagatccggcagaaaagcgagggcgagaagatcaacctggccatgaccaacgccgagtggctggagtacgcccagacccacctgctgaagcggcccgccgccaccaagaaggccggccaggccaagaagaagaagggcagctacccctacgacgtgcccgactacgcctacccctacgacgtgcccgactacgcctacccctacgacgtgcccgactacgcctga

SEQ ID NO: 1022 - RNA, 40 nt, synthetic construct
  misc_feature 1..40: note = HBG1-1 full-length gRNA
  source 1..40: mol_type = other RNA
taatttctactcttgtagatccttgtcaaggctattggtc

SEQ ID NO: 1023 - RNA, 41 nt, synthetic construct
  misc_feature 1..41: note = HBG1-1 modified full-length gRNA
  misc_feature 40: note = Modified to include 2'-O-methyl
  misc_feature 40..41: note = Linked by phosphorodithioate (PS2) bond
  misc_feature 41: note = Modified to include 2'-O-methyl
  source 1..41: mol_type = other RNA
taatttctactcttgtagatccttgtcaaggctattggtca

SEQ ID NO: 1024 - RNA, 95 nt, synthetic construct
  misc_feature 1..95: note = tSpA dead gRNA
  misc_feature 1: note = Modified to contain 2'-O-methyl
  misc_feature 1..2: note = Linked by phosphorothioate (PS) bond
  misc_feature 2..3: note = Linked by phosphorothioate (PS) bond
  misc_feature 2: note = Modified to contain 2'-O-methyl
  misc_feature 3..4: note = Linked by phosphorothioate (PS) bond
  misc_feature 3: note = Modified to contain 2'-O-methyl
  misc_feature 92..93: note = Linked by phosphorothioate (PS) bond
  misc_feature 92: note = Modified to contain 2'-O-methyl
  misc_feature 93..94: note = Linked by phosphorothioate (PS) bond
  misc_feature 93: note = Modified to contain 2'-O-methyl
  misc_feature 94..95: note = Linked by phosphorothioate (PS) bond
  misc_feature 94: note = Modified to contain 2'-O-methyl
  source 1..95: mol_type = other RNA
ggctggccaacccatgttttagagctagaaatagcaagttaaaataaggctagtccgttatcaacttgaaaaagtggcaccgagtcggtgctttt

SEQ ID NO: 1025 - RNA, 100 nt, synthetic construct; identical to SEQ ID NO: 997
  misc_feature 1..100: note = SpA full-length gRNA
  misc_feature 1: note = Modified to contain 2'-O-methyl
  misc_feature 1..2: note = Linked by phosphorothioate (PS) bond
  misc_feature 2: note = Modified to contain 2'-O-methyl
  misc_feature 2..3: note = Linked by phosphorothioate (PS) bond
  misc_feature 3: note = Modified to contain 2'-O-methyl
  misc_feature 3..4: note = Linked by phosphorothioate (PS) bond
  misc_feature 97: note = Modified to contain 2'-O-methyl
  misc_feature 97..98: note = Linked by phosphorothioate (PS) bond
  misc_feature 98: note = Modified to contain 2'-O-methyl
  misc_feature 98..99: note = Linked by phosphorothioate (PS) bond
  misc_feature 99..100: note = Linked by phosphorothioate (PS) bond
  misc_feature 99: note = Modified to contain 2'-O-methyl
  source 1..100: mol_type = other RNA

SEQ ID NO: 1026 - RNA, 100 nt, synthetic construct
  misc_feature 1..100: note = SpG full-length gRNA
  misc_feature 1: note = Modified to contain 2'-O-methyl
  misc_feature 1..2: note = Linked by phosphorothioate (PS) bond
  misc_feature 2: note = Modified to contain 2'-O-methyl
  misc_feature 2..3: note = Linked by phosphorothioate (PS) bond
  misc_feature 3: note = Modified to contain 2'-O-methyl
  misc_feature 3..4: note = Linked by phosphorothioate (PS) bond
  misc_feature 97: note = Modified to contain 2'-O-methyl
  misc_feature 97..98: note = Linked by phosphorothioate (PS) bond
  misc_feature 98: note = Modified to contain 2'-O-methyl
  misc_feature 98..99: note = Linked by phosphorothioate (PS) bond
  misc_feature 99..100: note = Linked by phosphorothioate (PS) bond
  misc_feature 99: note = Modified to contain 2'-O-methyl
  source 1..100: mol_type = other RNA
tagtcttagagtatccagtggttttagagctagaaatagcaagttaaaataaggctagtccgttatcaacttgaaaaagtggcaccgagtcggtgctttt

SEQ ID NO: 1027 - RNA, 95 nt, synthetic construct
  misc_feature 1..95: note = Sp182 dead gRNA
  misc_feature 1: note = Modified to contain 2'-O-methyl
  misc_feature 1..2: note = Linked by phosphorothioate (PS) bond
  misc_feature 2..3: note = Linked by phosphorothioate (PS) bond
  misc_feature 2: note = Modified to contain 2'-O-methyl
  misc_feature 3..4: note = Linked by phosphorothioate (PS) bond
  misc_feature 3: note = Modified to contain 2'-O-methyl
  misc_feature 92..93: note = Linked by phosphorothioate (PS) bond
  misc_feature 92: note = Modified to contain 2'-O-methyl
  misc_feature 93..94: note = Linked by phosphorothioate (PS) bond
  misc_feature 93: note = Modified to contain 2'-O-methyl
  misc_feature 94..95: note = Linked by phosphorothioate (PS) bond
  misc_feature 94: note = Modified to contain 2'-O-methyl
  source 1..95: mol_type = other RNA
ttagagtatccagtggttttagagctagaaatagcaagttaaaataaggctagtccgttatcaacttgaaaaagtggcaccgagtcggtgctttt

SEQ ID NO: 1028 - RNA, 15 nt, synthetic construct
  misc_feature 1..15: note = Sp182 dead gRNA targeting domain
  source 1..15: mol_type = other RNA
ttagagtatccagtg

SEQ ID NO: 1029 - DNA, 15 bp, synthetic construct
  misc_feature 1..15: note = Sp182 dgRNA targeting domain
  source 1..15: mol_type = other DNA
ttagagtatccagtg

SEQ ID NO: 1030 - DNA, 20 bp, synthetic construct
  misc_feature 1..20: note = SpG gRNA targeting domain
  source 1..20: mol_type = other DNA
tagtcttagagtatccagtg

SEQ ID NO: 1031 - DNA, 15 bp, synthetic construct
  misc_feature 1..15: note = tSpA dead gRNA targeting domain
  source 1..15: mol_type = other DNA
ggctggccaacccat

SEQ ID NO: 1032 - protein, 1334 aa, synthetic construct
  REGION 1..1334: note = His-AsCpf1-sNLS-sNLS H800A
  REGION 3..8: note = MISC_FEATURE - His tag
  REGION 1319..1325: note = MISC_FEATURE - sNLS
  REGION 1328..1334: note = MISC_FEATURE - sNLS
MGHHHHHHGSTQFEGFTNLYQVSKTLRFELIPQGKTLKHIQEQGFIEEDKARNDHYKELKPIIDRIYKTYADQCLQLVQLDWENLSAAIDSYRKEKTEETRNALIEEQATYRNAIHDYFIGRTDNLTDAINKRHAEIYKGLFKAELFNGKVLKQLGTVTTTEHENALLRSFDKFTTYFSGFYENRKNVFSAEDISTAIPHRIVQDNFPKFKENCHIFTRLITAVPSLREHFENVKKAIGIFVSTSIEEVFSFPFYNQLLTQTQIDLYNQLLGGISREAGTEKIKGLNEVLNLAIQKNDETAHIIASLPHRFIPLFKQILSDRNTLSFILEEFKSDEEVIQSFCKYKTLLRNENVLETAEALFNELNSIDLTHIFISHKKLETISSALCDHWDTLRNALYERRISELTGKITKSAKEKVQRSLKHEDINLQEIISAAGKELSEAFKQKTSEILSHAHAALDQPLPTTLKKQEEKEILKSQLDSLLGLYHLLDWFAVDESNEVDPEFSARLTGIKLEMEPSLSFYNKARNYATKKPYSVEKFKLNFQMPTLASGWDVNKEKNNGAILFVKNGLYYLGIMPKQKGRYKALSFEPTEKTSEGFDKMYYDYFPDAAKMIPKCSTQLKAVTAHFQTHTTPILLSNNFIEPLEITKEIYDLNNPEKEPKKFQTAYAKKTGDQKGYREALCKWIDFTRDFLSKYTKTTSIDLSSLRPSSQYKDLGEYYAELNPLLYHISFQRIAEKEIMDAVETGKLYLFQIYNKDFAKGHHGKPNLHTLYWTGLFSPENLAKTSIKLNGQAELFYRPKSRMKRMAARLGEKMLNKKLKDQKTPIPDTLYQELYDYVNHRLSHDLSDEARALLPNVITKEVSHEIIKDRRFTSDKFFFHVPITLNYQAANSPSKFNQRVNAYLKEHPETPIIGIDRGERNLIYITVIDSTGKILEQRSLNTIQQFDYQKKLDNREKERVAARQAWSVVGTIKDLKQGYLSQVIHEIVDLMIHYQAVVVLENLNFGFKSKRTGIAEKAVYQQFEKMLIDKLNCLVLKDYPAEKVGGVLNPYQLTDQFTSFAKMGTQSGFLFYVPAPYTSKIDPLTGFVDPFVWKTIKNHESRKHFLEGFDFLHYDVKTGDFILHFKMNRNLSFQRGLPGFMPAWDIVFEKNETQFDAKGTPFIAGKRIVPVIENHRFTGRYRDLYPANELIALLEEKGIVFRDGSNILPKLLENDDSHAIDTMVALIRSVLQMRNSNAATGEDYINSPVRDLNGVCFDSRFQNPEWPMDADANGAYHIALKGQLLLNHLKESKDLKLQNGISNQDWLAYIQELRNGSPKKKRKVGSPKKKRKV

SEQ ID NO: 1033 - protein, 1384 aa, synthetic construct
  REGION 1..1384: note = SpCas9WT
MKHHHHHHMPKKKRKVMDKKYSIGLDIGTNSVGWAVITDEYKVPSKKFKVLGNTDRHSIKKNLIGALLFDSGETAEATRLKRTARRRYTRRKNRICYLQEIFSNEMAKVDDSFFHRLEESFLVEEDKKHERHPIFGNIVDEVAYHEKYPTIYHLRKKLVDSTDKADLRLIYLALAHMIKFRGHFLIEGDLNPDNSDVDKLFIQLVQTYNQLFEENPINASGVDAKAILSARLSKSRRLENLIAQLPGEKKNGLFGNLIALSLGLTPNFKSNFDLAEDAKLQLSKDTYDDDLDNLLAQIGDQYADLFLAAKNLSDAILLSDILRVNTEITKAPLSASMIKRYDEHHQDLTLLKALVRQQLPEKYKEIFFDQSKNGYAGYIDGGASQEEFYKFIKPILEKMDGTEELLVKLNREDLLRKQRTFDNGSIPHQIHLGELHAILRRQEDFYPFLKDNREKIEKILTFRIPYYVGPLARGNSRFAWMTRKSEETITPWNFEEVVDKGASAQSFIERMTNFDKNLPNEKVLPKHSLLYEYFTVYNELTKVKYVTEGMRKPAFLSGEQKKAIVDLLFKTNRKVTVKQLKEDYFKKIECFDSVEISGVEDRFNASLGTYHDLLKIIKDKDFLDNEENEDILEDIVLTLTLFEDREMIEERLKTYAHLFDDKVMKQLKRRRYTGWGRLSRKLINGIRDKQSGKTILDFLKSDGFANRNFMQLIHDDSLTFKEDIQKAQVSGQGDSLHEHIANLAGSPAIKKGILQTVKVVDELVKVMGRHKPENIVIEMARENQTTQKGQKNSRERMKRIEEGIKELGSQILKEHPVENTQLQNEKLYLYYLQNGRDMYVDQELDINRLSDYDVDHIVPQSFLKDDSIDNKVLTRSDKNRGKSDNVPSEEVVKKMKNYWRQLLNAKLITQRKFDNLTKAERGGLSELDKAGFIKRQLVETRQITKHVAQILDSRMNTKYDENDKLIREVKVITLKSKLVSDFRKDFQFYKVREINNYHHAHDAYLNAVVGTALIKKYPKLESEFVYGDYKVYDVRKMIAKSEQEIGKATAKYFFYSNIMNFFKTEITLANGEIRKRPLIETNGETGEIVWDKGRDFATVRKVLSMPQVNIVKKTEVQTGGFSKESILPKRNSDKLIARKKDWDPKKYGGFDSPTVAYSVLVVAKVEKGKSKKLKSVKELLGITIMERSSFEKNPIDFLEAKGYKEVKKDLIIKLPKYSLFELENGRKRMLASAGELQKGNELALPSKYVNFLYLASHYEKLKGSPEDNEQKQLFVEQHKHYLDEIIEQISEFSKRVILADANLDKVLSAYNKHRDKPIREQAENIIHLFTLTNLGAPAAFKYFDTTIDRKRYTSTKEVLDATLIHQSITGLYETRIDLSQLGGD

SEQ ID NO: 1034 - protein, 1384 aa, synthetic construct
  REGION 1..1384: note = His-NLS-SpCas9D10A
MKHHHHHHMPKKKRKVMDKKYSIGLAIGTNSVGWAVITDEYKVPSKKFKVLGNTDRHSIKKNLIGALLFDSGETAEATRLKRTARRRYTRRKNRICYLQEIFSNEMAKVDDSFFHRLEESFLVEEDKKHERHPIFGNIVDEVAYHEKYPTIYHLRKKLVDSTDKADLRLIYLALAHMIKFRGHFLIEGDLNPDNSDVDKLFIQLVQTYNQLFEENPINASGVDAKAILSARLSKSRRLENLIAQLPGEKKNGLFGNLIALSLGLTPNFKSNFDLAEDAKLQLSKDTYDDDLDNLLAQIGDQYADLFLAAKNLSDAILLSDILRVNTEITKAPLSASMIKRYDEHHQDLTLLKALVRQQLPEKYKEIFFDQSKNGYAGYIDGGASQEEFYKFIKPILEKMDGTEELLVKLNREDLLRKQRTFDNGSIPHQIHLGELHAILRRQEDFYPFLKDNREKIEKILTFRIPYYVGPLARGNSRFAWMTRKSEETITPWNFEEVVDKGASAQSFIERMTNFDKNLPNEKVLPKHSLLYEYFTVYNELTKVKYVTEGMRKPAFLSGEQKKAIVDLLFKTNRKVTVKQLKEDYFKKIECFDSVEISGVEDRFNASLGTYHDLLKIIKDKDFLDNEENEDILEDIVLTLTLFEDREMIEERLKTYAHLFDDKVMKQLKRRRYTGWGRLSRKLINGIRDKQSGKTILDFLKSDGFANRNFMQLIHDDSLTFKEDIQKAQVSGQGDSLHEHIANLAGSPAIKKGILQTVKVVDELVKVMGRHKPENIVIEMARENQTTQKGQKNSRERMKRIEEGIKELGSQILKEHPVENTQLQNEKLYLYYLQNGRDMYVDQELDINRLSDYDVDHIVPQSFLKDDSIDNKVLTRSDKNRGKSDNVPSEEVVKKMKNYWRQLLNAKLITQRKFDNLTKAERGGLSELDKAGFIKRQLVETRQITKHVAQILDSRMNTKYDENDKLIREVKVITLKSKLVSDFRKDFQFYKVREINNYHHAHDAYLNAVVGTALIKKYPKLESEFVYGDYKVYDVRKMIAKSEQEIGKATAKYFFYSNIMNFFKTEITLANGEIRKRPLIETNGETGEIVWDKGRDFATVRKVLSMPQVNIVKKTEVQTGGFSKESILPKRNSDKLIARKKDWDPKKYGGFDSPTVAYSVLVVAKVEKGKSKKLKSVKELLGITIMERSSFEKNPIDFLEAKGYKEVKKDLIIKLPKYSLFELENGRKRMLASAGELQKGNELALPSKYVNFLYLASHYEKLKGSPEDNEQKQLFVEQHKHYLDEIIEQISEFSKRVILADANLDKVLSAYNKHRDKPIREQAENIIHLFTLTNLGAPAAFKYFDTTIDRKRYTSTKEVLDATLIHQSITGLYETRIDLSQLGGD

SEQ ID NO: 1035 - protein, 1333 aa, synthetic construct; identical to SEQ ID NO: 1001
  REGION 1..1333: note = AsCpf1 His-AsCpf1-NLS-NLS

SEQ ID NO: 1036 - protein, 1332 aa, synthetic construct
  REGION 1..1332: note = AsCpf1 S542R/K607R (AsCpf1 RR)
MKHHHHHHMPKKKRKVMTQFEGFTNLYQVSKTLRFELIPQGKTLKHIQEQGFIEEDKARNDHYKELKPIIDRIYKTYADQCLQLVQLDWENLSAAIDSYRKEKTEETRNALIEEQATYRNAIHDYFIGRTDNLTDAINKRHAEIYKGLFKAELFNGKVLKQLGTVTTTEHENALLRSFDKFTTYFSGFYENRKNVFSAEDISTAIPHRIVQDNFPKFKENCHIFTRLITAVPSLREHFENVKKAIGIFVSTSIEEVFSFPFYNQLLTQTQIDLYNQLLGGISREAGTEKIKGLNEVLNLAIQKNDETAHIIASLPHRFIPLFKQILSDRNTLSFILEEFKSDEEVIQSFCKYKTLLRNENVLETAEALFNELNSIDLTHIFISHKKLETISSALCDHWDTLRNALYERRISELTGKITKSAKEKVQRSLKHEDINLQEIISAAGKELSEAFKQKTSEILSHAHAALDQPLPTTLKKQEEKEILKSQLDSLLGLYHLLDWFAVDESNEVDPEFSARLTGIKLEMEPSLSFYNKARNYATKKPYSVEKFKLNFQMPTLARGWDVNKEKNNGAILFVKNGLYYLGIMPKQKGRYKALSFEPTEKTSEGFDKMYYDYFPDAAKMIPRCSTQLKAVTAHFQTHTTPILLSNNFIEPLEITKEIYDLNNPEKEPKKFQTAYAKKTGDQKGYREALCKWIDFTRDFLSKYTKTTSIDLSSLRPSSQYKDLGEYYAELNPLLYHISFQRIAEKEIMDAVETGKLYLFQIYNKDFAKGHHGKPNLHTLYWTGLFSPENLAKTSIKLNGQAELFYRPKSRMKRMAHRLGEKMLNKKLKDQKTPIPDTLYQELYDYVNHRLSHDLSDEARALLPNVITKEVSHEIIKDRRFTSDKFFFHVPITLNYQAANSPSKFNQRVNAYLKEHPETPIIGIDRGERNLIYITVIDSTGKILEQRSLNTIQQFDYQKKLDNREKERVAARQAWSVVGTIKDLKQGYLSQVIHEIVDLMIHYQAVVVLENLNFGFKSKRTGIAEKAVYQQFEKMLIDKLNCLVLKDYPAEKVGGVLNPYQLTDQFTSFAKMGTQSGFLFYVPAPYTSKIDPLTGFVDPFVWKTIKNHESRKHFLEGFDFLHYDVKTGDFILHFKMNRNLSFQRGLPGFMPAWDIVFEKNETQFDAKGTPFIAGKRIVPVIENHRFTGRYRDLYPANELIALLEEKGIVFRDGSNILPKLLENDDSHAIDTMVALIRSVLQMRNSNAATGEDYINSPVRDLNGVCFDSRFQNPEWPMDADANGAYHIALKGQLLLNHLKESKDLKLQNGISNQDWLAYIQELRNGPKKKRKVG

SEQ ID NO: 1037 - protein, 1332 aa, synthetic construct
  REGION 1..1332: note = AsCpf1 S542R/K548V/N552R (AsCpf1 RVR)
MKHHHHHHMPKKKRKVMTQFEGFTNLYQVSKTLRFELIPQGKTLKHIQEQGFIEEDKARNDHYKELKPIIDRIYKTYADQCLQLVQLDWENLSAAIDSYRKEKTEETRNALIEEQATYRNAIHDYFIGRTDNLTDAINKRHAEIYKGLFKAELFNGKVLKQLGTVTTTEHENALLRSFDKFTTYFSGFYENRKNVFSAEDISTAIPHRIVQDNFPKFKENCHIFTRLITAVPSLREHFENVKKAIGIFVSTSIEEVFSFPFYNQLLTQTQIDLYNQLLGGISREAGTEKIKGLNEVLNLAIQKNDETAHIIASLPHRFIPLFKQILSDRNTLSFILEEFKSDEEVIQSFCKYKTLLRNENVLETAEALFNELNSIDLTHIFISHKKLETISSALCDHWDTLRNALYERRISELTGKITKSAKEKVQRSLKHEDINLQEIISAAGKELSEAFKQKTSEILSHAHAALDQPLPTTLKKQEEKEILKSQLDSLLGLYHLLDWFAVDESNEVDPEFSARLTGIKLEMEPSLSFYNKARNYATKKPYSVEKFKLNFQMPTLARGWDVNVEKNRGAILFVKNGLYYLGIMPKQKGRYKALSFEPTEKTSEGFDKMYYDYFPDAAKMIPKCSTQLKAVTAHFQTHTTPILLSNNFIEPLEITKEIYDLNNPEKEPKKFQTAYAKKTGDQKGYREALCKWIDFTRDFLSKYTKTTSIDLSSLRPSSQYKDLGEYYAELNPLLYHISFQRIAEKEIMDAVETGKLYLFQIYNKDFAKGHHGKPNLHTLYWTGLFSPENLAKTSIKLNGQAELFYRPKSRMKRMAHRLGEKMLNKKLKDQKTPIPDTLYQELYDYVNHRLSHDLSDEARALLPNVITKEVSHEIIKDRRFTSDKFFFHVPITLNYQAANSPSKFNQRVNAYLKEHPETPIIGIDRGERNLIYITVIDSTGKILEQRSLNTIQQFDYQKKLDNREKERVAARQAWSVVGTIKDLKQGYLSQVIHEIVDLMIHYQAVVVLENLNFGFKSKRTGIAEKAVYQQFEKMLIDKLNCLVLKDYPAEKVGGVLNPYQLTDQFTSFAKMGTQSGFLFYVPAPYTSKIDPLTGFVDPFVWKTIKNHESRKHFLEGFDFLHYDVKTGDFILHFKMNRNLSFQRGLPGFMPAWDIVFEKNETQFDAKGTPFIAGKRIVPVIENHRFTGRYRDLYPANELIALLEEKGIVFRDGSNILPKLLENDDSHAIDTMVALIRSVLQMRNSNAATGEDYINSPVRDLNGVCFDSRFQNPEWPMDADANGAYHIALKGQLLLNHLKESKDLKLQNGISNQDWLAYIQELRNGPKKKRKVG

SEQ ID NO: 1038 - protein, 1334 aa, synthetic construct
  REGION 1..1334: note = His-AsCpf1-2xNLS-S542R/K607R/H800A (AsCpf1 RR-H800A)
MGHHHHHHGSTQFEGFTNLYQVSKTLRFELIPQGKTLKHIQEQGFIEEDKARNDHYKELKPIIDRIYKTYADQCLQLVQLDWENLSAAIDSYRKEKTEETRNALIEEQATYRNAIHDYFIGRTDNLTDAINKRHAEIYKGLFKAELFNGKVLKQLGTVTTTEHENALLRSFDKFTTYFSGFYENRKNVFSAEDISTAIPHRIVQDNFPKFKENCHIFTRLITAVPSLREHFENVKKAIGIFVSTSIEEVFSFPFYNQLLTQTQIDLYNQLLGGISREAGTEKIKGLNEVLNLAIQKNDETAHIIASLPHRFIPLFKQILSDRNTLSFILEEFKSDEEVIQSFCKYKTLLRNENVLETAEALFNELNSIDLTHIFISHKKLETISSALCDHWDTLRNALYERRISELTGKITKSAKEKVQRSLKHEDINLQEIISAAGKELSEAFKQKTSEILSHAHAALDQPLPTTLKKQEEKEILKSQLDSLLGLYHLLDWFAVDESNEVDPEFSARLTGIKLEMEPSLSFYNKARNYATKKPYSVEKFKLNFQMPTLARGWDVNKEKNNGAILFVKNGLYYLGIMPKQKGRYKALSFEPTEKTSEGFDKMYYDYFPDAAKMIPRCSTQLKAVTAHFQTHTTPILLSNNFIEPLEITKEIYDLNNPEKEPKKFQTAYAKKTGDQKGYREALCKWIDFTRDFLSKYTKTTSIDLSSLRPSSQYKDLGEYYAELNPLLYHISFQRIAEKEIMDAVETGKLYLFQIYNKDFAKGHHGKPNLHTLYWTGLFSPENLAKTSIKLNGQAELFYRPKSRMKRMAARLGEKMLNKKLKDQKTPIPDTLYQELYDYVNHRLSHDLSDEARALLPNVITKEVSHEIIKDRRFTSDKFFFHVPITLNYQAANSPSKFNQRVNAYLKEHPETPIIGIDRGERNLIYITVIDSTGKILEQRSLNTIQQFDYQKKLDNREKERVAARQAWSVVGTIKDLKQGYLSQVIHEIVDLMIHYQAVVVLENLNFGFKSKRTGIAEKAVYQQFEKMLIDKLNCLVLKDYPAEKVGGVLNPYQLTDQFTSFAKMGTQSGFLFYVPAPYTSKIDPLTGFVDPFVWKTIKNHESRKHFLEGFDFLHYDVKTGDFILHFKMNRNLSFQRGLPGFMPAWDIVFEKNETQFDAKGTPFIAGKRIVPVIENHRFTGRYRDLYPANELIALLEEKGIVFRDGSNILPKLLENDDSHAIDTMVALIRSVLQMRNSNAATGEDYINSPVRDLNGVCFDSRFQNPEWPMDADANGAYHIALKGQLLLNHLKESKDLKLQNGISNQDWLAYIQELRNGSPKKKRKVGSPKKKRKV

SEQ ID NO: 1039 - protein, 1334 aa, synthetic construct
  REGION 1..1334: note = His-AsCpf1-2xNLS-S542R-K548V-N552R-H800A (Cpf1 RVR H800A)
MGHHHHHHGSTQFEGFTNLYQVSKTLRFELIPQGKTLKHIQEQGFIEEDKARNDHYKELKPIIDRIYKTYADQCLQLVQLDWENLSAAIDSYRKEKTEETRNALIEEQATYRNAIHDYFIGRTDNLTDAINKRHAEIYKGLFKAELFNGKVLKQLGTVTTTEHENALLRSFDKFTTYFSGFYENRKNVFSAEDISTAIPHRIVQDNFPKFKENCHIFTRLITAVPSLREHFENVKKAIGIFVSTSIEEVFSFPFYNQLLTQTQIDLYNQLLGGISREAGTEKIKGLNEVLNLAIQKNDETAHIIASLPHRFIPLFKQILSDRNTLSFILEEFKSDEEVIQSFCKYKTLLRNENVLETAEALFNELNSIDLTHIFISHKKLETISSALCDHWDTLRNALYERRISELTGKITKSAKEKVQRSLKHEDINLQEIISAAGKELSEAFKQKTSEILSHAHAALDQPLPTTLKKQEEKEILKSQLDSLLGLYHLLDWFAVDESNEVDPEFSARLTGIKLEMEPSLSFYNKARNYATKKPYSVEKFKLNFQMPTLARGWDVNVEKNRGAILFVKNGLYYLGIMPKQKGRYKALSFEPTEKTSEGFDKMYYDYFPDAAKMIPKCSTQLKAVTAHFQTHTTPILLSNNFIEPLEITKEIYDLNNPEKEPKKFQTAYAKKTGDQKGYREALCKWIDFTRDFLSKYTKTTSIDLSSLRPSSQYKDLGEYYAELNPLLYHISFQRIAEKEIMDAVETGKLYLFQIYNKDFAKGHHGKPNLHTLYWTGLFSPENLAKTSIKLNGQAELFYRPKSRMKRMAARLGEKMLNKKLKDQKTPIPDTLYQELYDYVNHRLSHDLSDEARALLPNVITKEVSHEIIKDRRFTSDKFFFHVPITLNYQAANSPSKFNQRVNAYLKEHPETPIIGIDRGERNLIYITVIDSTGKILEQRSLNTIQQFDYQKKLDNREKERVAARQAWSVVGTIKDLKQGYLSQVIHEIVDLMIHYQAVVVLENLNFGFKSKRTGIAEKAVYQQFEKMLIDKLNCLVLKDYPAEKVGGVLNPYQLTDQFTSFAKMGTQSGFLFYVPAPYTSKIDPLTGFVDPFVWKTIKNHESRKHFLEGFDFLHYDVKTGDFILHFKMNRNLSFQRGLPGFMPAWDIVFEKNETQFDAKGTPFIAGKRIVPVIENHRFTGRYRDLYPANELIALLEEKGIVFRDGSNILPKLLENDDSHAIDTMVALIRSVLQMRNSNAATGEDYINSPVRDLNGVCFDSRFQNPEWPMDADANGAYHIALKGQLLLNHLKESKDLKLQNGISNQDWLAYIQELRNGSPKKKRKVGSPKKKRKV

SEQ ID NO: 1040 - DNA, 100 bp, synthetic construct
  misc_feature 1..100: note = Ptx ssODN 18nt - positive strand (OLI16431)
  misc_feature 1..2: note = Linked by phosphorothioate (PS) bond
  misc_feature 99..100: note = Linked by phosphorothioate (PS) bond
  source 1..100: mol_type = other DNA
ccctggcctcactggatactctaagactattggtcaagtttgccttgtcaaggctggccaacccatgggtggagtttagccagggaccgtttcagacaga

SEQ ID NO: 1041 - RNA, 40 nt, synthetic construct; identical to SEQ ID NO: 1022
  misc_feature 1..40: note = gRNA
  misc_feature 39: note = Modified to contain 2'-O-methyl
  misc_feature 39..40: note = Linked by phosphorodithioate (PS2) bond
  misc_feature 40: note = Modified to contain 2'-O-methyl
  source 1..40: mol_type = other RNA

SEQ ID NO: 1042 - RNA, 45 nt, synthetic construct
  misc_feature 1..45: note = gRNA
  source 1..45: mol_type = other RNA
ctttttaatttctactcttgtagatccttgtcaaggctattggtc

SEQ ID NO: 1043 - RNA, 50 nt, synthetic construct
  misc_feature 1..50: note = gRNA
  source 1..50: mol_type = other RNA
aagacctttttaatttctactcttgtagatccttgtcaaggctattggtc

SEQ ID NO: 1044 - RNA, 65 nt, synthetic construct
  misc_feature 1..65: note = gRNA
  source 1..65: mol_type = other RNA
atgtgtttttgtcaaaagacctttttaatttctactcttgtagatccttgtcaaggctattggtc

SEQ ID NO: 1045 - RNA, 100 nt, synthetic construct
  misc_feature 1..100: note = gRNA
  source 1..100: mol_type = other RNA
aggccagcttgccggttttttagtcgtgctgcttcatgtgtttttgtcaaaagacctttttaatttctactcttgtagatccttgtcaaggctattggtc

SEQ ID NO: 1046 - DNA, 45 bp, synthetic construct
  misc_feature 1..45: note = gRNA
  misc_feature 1..5: note = DNA nucleotides
  misc_feature 6..45: note = RNA nucleotides
  source 1..45: mol_type = other DNA
ctttttaatttctactcttgtagatccttgtcaaggctattggtc

SEQ ID NO: 1047 - DNA, 50 bp, synthetic construct
  misc_feature 1..50: note = gRNA
  misc_feature 1..10: note = DNA nucleotides
  misc_feature 11..50: note = RNA nucleotides
  source 1..50: mol_type = other DNA
aagacctttttaatttctactcttgtagatccttgtcaaggctattggtc

SEQ ID NO: 1048 - DNA, 65 bp, synthetic construct
  misc_feature 1..65: note = gRNA
  misc_feature 1..25: note = DNA nucleotides
  misc_feature 26..65: note = RNA nucleotides
  source 1..65: mol_type = other DNA
atgtgtttttgtcaaaagacctttttaatttctactcttgtagatccttgtcaaggctattggtc

SEQ ID NO: 1049 - DNA, 100 bp, synthetic construct
  misc_feature 1..100: note = gRNA
  misc_feature 1..60: note = DNA nucleotides
  misc_feature 61..100: note = RNA nucleotides
  source 1..100: mol_type = other DNA
aggccagcttgccggttttttagtcgtgctgcttcatgtgtttttgtcaaaagacctttttaatttctactcttgtagatccttgtcaaggctattggtc

SEQ ID NO: 1050 - DNA, 66 bp, synthetic construct
  misc_feature 1..66: note = gRNA
  misc_feature 1..25: note = DNA nucleotides
  misc_feature 26..66: note = RNA nucleotides
  misc_feature 65: note = Modified to contain 2'-O-methyl
  misc_feature 65..66: note = Linked by phosphorodithioate (PS2) bond
  misc_feature 66: note = Modified to contain 2'-O-methyl
  source 1..66: mol_type = other DNA
atgtgtttttgtcaaaagacctttttaatttctactcttgtagatccttgtcaaggctattggtca

SEQ ID NO: 1051 - DNA, 66 bp, synthetic construct; identical to SEQ ID NO: 1050
  misc_feature 1..66: note = gRNA
  misc_feature 1..25: note = DNA nucleotides
  misc_feature 26..66: note = RNA nucleotides
  misc_feature 65..66: note = Linked by phosphorothioate (PS) bond
  misc_feature 66: note = Modified to contain 2'-O-methyl
  source 1..66: mol_type = other DNA

SEQ ID NO: 1052 - DNA, 60 bp, synthetic construct
  misc_feature 1..60: note = gRNA
  misc_feature 1..20: note = DNA nucleotides
  misc_feature 21..60: note = RNA nucleotides
  source 1..60: mol_type = other DNA
tttttgtcaaaagacctttttaatttctactcttgtagatccttgtcaaggctattggtc

SEQ ID NO: 1053 - DNA, 70 bp, synthetic construct
  misc_feature 1..70: note = gRNA
  misc_feature 1..30: note = DNA nucleotides
  misc_feature 31..70: note = RNA nucleotides
  source 1..70: mol_type = other DNA
gcttcatgtgtttttgtcaaaagacctttttaatttctactcttgtagatccttgtcaaggctattggtc

SEQ ID NO: 1054 - DNA, 90 bp, synthetic construct
  misc_feature 1..90: note = gRNA
  misc_feature 1..50: note = DNA nucleotides
  misc_feature 51..90: note = RNA nucleotides
  source 1..90: mol_type = other DNA
gccggttttttagtcgtgctgcttcatgtgtttttgtcaaaagacctttttaatttctactcttgtagatccttgtcaaggctattggtc

SEQ ID NO: 1055 - DNA, 80 bp, synthetic construct
  misc_feature 1..80: note = gRNA
  misc_feature 1..40: note = DNA nucleotides
  misc_feature 41..80: note = RNA nucleotides
  source 1..80: mol_type = other DNA
tagtcgtgctgcttcatgtgtttttgtcaaaagacctttttaatttctactcttgtagatccttgtcaaggctattggtc

SEQ ID NO: 1056 - DNA, 60 bp, synthetic construct
  misc_feature 1..60: note = gRNA
  misc_feature 1..20: note = DNA nucleotides
  misc_feature 1..2: note = Linked by phosphorothioate (PS) bond
  misc_feature 2..3: note = Linked by phosphorothioate (PS) bond
  misc_feature 21..60: note = RNA nucleotides
  source 1..60: mol_type = other DNA
ccgaagttttcttcggtttttaatttctactcttgtagatccttgtcaaggctattggtc

SEQ ID NO: 1057 - DNA, 65 bp, synthetic construct
  misc_feature 1..65: note = gRNA
  misc_feature 1..25: note = DNA nucleotides
  misc_feature 1..2: note = Linked by phosphorothioate (PS) bond
  misc_feature 2..3: note = Linked by phosphorothioate (PS) bond
  misc_feature 26..65: note = RNA nucleotides
  source 1..65: mol_type = other DNA
tttttccgaagttttcttcggtttttaatttctactcttgtagatccttgtcaaggctattggtc

SEQ ID NO: 1058 - DNA, 70 bp, synthetic construct
  misc_feature 1..70: note = gRNA
  misc_feature 1..30: note = DNA nucleotides
  misc_feature 1..2: note = Linked by phosphorothioate (PS) bond
  misc_feature 2..3: note = Linked by phosphorothioate (PS) bond
  misc_feature 31..70: note = RNA nucleotides
  source 1..70: mol_type = other DNA
aacgctttttccgaagttttcttcggtttttaatttctactcttgtagatccttgtcaaggctattggtc

SEQ ID NO: 1059 - DNA, 81 bp, synthetic construct
  misc_feature 1..81: note = gRNA
  misc_feature 1..41: note = DNA nucleotides
  misc_feature 1..2: note = Linked by phosphorothioate (PS) bond
  misc_feature 2..3: note = Linked by phosphorothioate (PS) bond
  misc_feature 42..81: note = RNA nucleotides
  source 1..81: mol_type = other DNA
gcgttgttttcaacgctttttccgaagttttcttcggtttttaatttctactcttgtagatccttgtcaaggctattggtc

SEQ ID NO: 1060 - DNA, 102 bp, synthetic construct
  misc_feature 1..102: note = gRNA
  misc_feature 1..62: note = DNA nucleotides
  misc_feature 1..2: note = Linked by phosphorothioate (PS) bond
  misc_feature 2..3: note = Linked by phosphorothioate (PS) bond
  misc_feature 63..102: note = RNA nucleotides
  source 1..102: mol_type = other DNA
ggcttcttttgaagcctttttgcgttgttttcaacgctttttccgaagttttcttcggtttttaatttctactcttgtagatccttgtcaaggctattggtc

SEQ ID NO: 1061 - RNA, 40 nt, synthetic construct; identical to SEQ ID NO: 1022
  misc_feature 1..40: note = gRNA
  misc_feature 1: note = Modified to contain 2'-O-methyl
  source 1..40: mol_type = other RNA

SEQ ID NO: 1062 - RNA, 40 nt, synthetic construct; identical to SEQ ID NO: 1022
  misc_feature 1..40: note = gRNA
  misc_feature 1: note = Modified to contain 2'-O-methyl
  misc_feature 1..2: note = Linked by phosphorothioate (PS) bond
  source 1..40: mol_type = other RNA

SEQ ID NO: 1063 - RNA, 40 nt, synthetic construct; identical to SEQ ID NO: 1022
  misc_feature 1..40: note = gRNA
  misc_feature 1: note = Modified to contain 2'-O-methyl
  misc_feature 2: note = Modified to contain 2'-O-methyl
  source 1..40: mol_type = other RNA

SEQ ID NO: 1064 - RNA, 40 nt, synthetic construct; identical to SEQ ID NO: 1022
  misc_feature 1..40: note = gRNA
  misc_feature 1: note = Modified to contain 2'-O-methyl
  misc_feature 1..2: note = Linked by phosphorothioate (PS) bond
  misc_feature 2: note = Modified to contain 2'-O-methyl
  source 1..40: mol_type = other RNA

SEQ ID NO: 1065 - RNA, 40 nt, synthetic construct; identical to SEQ ID NO: 1022
  misc_feature 1..40: note = gRNA
  misc_feature 1: note = Modified to contain 2'-O-methyl
  misc_feature 2: note = Modified to contain 2'-O-methyl
  misc_feature 3: note = Modified to contain 2'-O-methyl
  source 1..40: mol_type = other RNA

SEQ ID NO: 1066 - RNA, 40 nt, synthetic construct; identical to SEQ ID NO: 1022
  misc_feature 1..40: note = gRNA
  misc_feature 1: note = Modified to contain 2'-O-methyl
  misc_feature 1..2: note = Linked by phosphorothioate (PS) bond
  misc_feature 2..3: note = Linked by phosphorothioate (PS) bond
  misc_feature 2: note = Modified to contain 2'-O-methyl
  misc_feature 3..4: note = Linked by phosphorothioate (PS) bond
  misc_feature 3: note = Modified to contain 2'-O-methyl
  source 1..40: mol_type = other RNA

SEQ ID NO: 1067 - DNA, 65 bp, synthetic construct; identical to SEQ ID NO: 1048
  misc_feature 1..65: note = gRNA
  misc_feature 1..25: note = DNA nucleotides
  misc_feature 1..2: note = Linked by phosphorothioate (PS) bond
  misc_feature 2..3: note = Linked by phosphorothioate (PS) bond
  misc_feature 26..65: note = RNA nucleotides
  source 1..65: mol_type = other DNA

SEQ ID NO: 1068 - DNA, 66 bp, synthetic construct; identical to SEQ ID NO: 1050
  misc_feature 1..66: note = gRNA
  misc_feature 1..25: note = DNA nucleotides
  misc_feature 1..2: note = Linked by phosphorothioate (PS) bond
  misc_feature 2..3: note = Linked by phosphorothioate (PS) bond
  misc_feature 26..66: note = RNA nucleotides
  misc_feature 65..66: note = Linked by phosphorothioate (PS) bond
  misc_feature 66: note = Modified to contain 2'-O-methyl
  source 1..66: mol_type = other DNA

SEQ ID NO: 1069 - RNA, 41 nt, synthetic construct; identical to SEQ ID NO: 1023
  misc_feature 1..41: note = gRNA
  misc_feature 40..41: note = Linked by phosphorothioate (PS) bond
  misc_feature 41: note = Modified to contain 2'-O-methyl
  source 1..41: mol_type = other RNA

SEQ ID NO: 1070 - RNA, 42 nt, synthetic construct
  misc_feature 1..42: note = gRNA
  misc_feature 41: note = Modified to contain 2'-O-methyl
  misc_feature 41..42: note = Linked by phosphorothioate (PS) bond
  source 1..42: mol_type = other RNA
taatttctactcttgtagatccttgtcaaggctattggtcat

SEQ ID NO: 1071 - RNA, 41 nt, synthetic construct
  misc_feature 1..41: note = gRNA
  source 1..41: mol_type = other RNA
taatttctactcttgtagatccttgtcaaggctattggtct

SEQ ID NO: 1072 - RNA, 42 nt, synthetic construct; identical to SEQ ID NO: 1070
  misc_feature 1..42: note = gRNA
  source 1..42: mol_type = other RNA

SEQ ID NO: 1073 - RNA, 44 nt, synthetic construct
  misc_feature 1..44: note = gRNA
  source 1..44: mol_type = other RNA
taatttctactcttgtagatccttgtcaaggctattggtcaagt

SEQ ID NO: 1074 - DNA, 66 bp, synthetic construct
  misc_feature 1..66: note = gRNA
  misc_feature 1..25: note = DNA nucleotides
  misc_feature 1..2: note = Linked by phosphorothioate (PS) bond
  misc_feature 2..3: note = Linked by phosphorothioate (PS) bond
  misc_feature 26..66: note = RNA nucleotides
  source 1..66: mol_type = other DNA
atgtgtttttgtcaaaagacctttttaatttctactcttgtagatccttgtcaaggctattggtct

SEQ ID NO: 1075 - DNA, 69 bp, synthetic construct
  misc_feature 1..69: note = gRNA
  misc_feature 1..25: note = DNA nucleotides
  misc_feature 1..2: note = Linked by phosphorothioate (PS) bond
  misc_feature 2..3: note = Linked by phosphorothioate (PS) bond
  misc_feature 26..69: note = RNA nucleotides
  source 1..69: mol_type = other DNA
atgtgtttttgtcaaaagacctttttaatttctactcttgtagatccttgtcaaggctattggtcaagt

SEQ ID NO: 1076 - RNA, 41 nt, synthetic construct; identical to SEQ ID NO: 1023
  misc_feature 1..41: note = gRNA
  source 1..41: mol_type = other RNA

SEQ ID NO: 1077 - RNA, 43 nt, synthetic construct
  misc_feature 1..43: note = gRNA
  source 1..43: mol_type = other RNA
taatttctactcttgtagatccttgtcaaggctattggtcaag

SEQ ID NO: 1078 - DNA, 68 bp, synthetic construct
  misc_feature 1..68: note = gRNA
  misc_feature 1..25: note = DNA nucleotides
  misc_feature 1..2: note = Linked by phosphorothioate (PS) bond
  misc_feature 2..3: note = Linked by phosphorothioate (PS) bond
  misc_feature 26..68: note = RNA nucleotides
  source 1..68: mol_type = other DNA
atgtgtttttgtcaaaagacctttttaatttctactcttgtagatccttgtcaaggctattggtcaag

SEQ ID NO: 1079 - RNA, 44 nt, synthetic construct
  misc_feature 1..44: note = gRNA
  source 1..44: mol_type = other RNA
taatttctactcttgtagatccttgtcaaggctattggtctttt

SEQ ID NO: 1080 - RNA, 44 nt, synthetic construct; identical to SEQ ID NO: 1079
  misc_feature 1..44: note = gRNA
  misc_feature 41: note = Modified to contain 2'-O-methyl
  misc_feature 41..42: note = Linked by phosphorothioate (PS) bond
  misc_feature 42..43: note = Linked by phosphorothioate (PS) bond
  misc_feature 42: note = Modified to contain 2'-O-methyl
  misc_feature 43: note = Modified to contain 2'-O-methyl
  misc_feature 43..44: note = Linked by phosphorothioate (PS) bond
  source 1..44: mol_type = other RNA

SEQ ID NO: 1081 - DNA, 69 bp, synthetic construct
  misc_feature 1..69: note = gRNA
  misc_feature 1..25: note = DNA nucleotides
  misc_feature 1..2: note = Linked by phosphorothioate (PS) bond
  misc_feature 2..3: note = Linked by phosphorothioate (PS) bond
  misc_feature 26..69: note = RNA nucleotides
  source 1..69: mol_type = other DNA
atgtgtttttgtcaaaagacctttttaatttctactcttgtagatccttgtcaaggctattggtctttt

SEQ ID NO: 1082 - DNA, 66 bp, synthetic construct
  misc_feature 1..66: note = gRNA
  misc_feature 1..25: note = DNA nucleotides
  misc_feature 26..66: note = RNA nucleotides
  misc_feature 65..66: note = Linked by phosphorothioate (PS) bond
  misc_feature 66: note = Modified to contain 2'-O-methyl
  source 1..66: mol_type = other DNA
aaaaaaaaaaaaaaaaaaaaaaaaataatttctactcttgtagatccttgtcaaggctattggtca

SEQ ID NO: 1083 - DNA, 66 bp, synthetic construct
  misc_feature 1..66: note = gRNA
  misc_feature 1..25: note = DNA nucleotides
  misc_feature 26..66: note = RNA nucleotides
  misc_feature 65..66: note = Linked by phosphorothioate (PS) bond
  misc_feature 66: note = Modified to contain 2'-O-methyl
  source 1..66: mol_type = other DNA
ttttttttttttttttttttttttttaatttctactcttgtagatccttgtcaaggctattggtca

SEQ ID NO: 1084 - DNA, 61 bp, synthetic construct
  misc_feature 1..61: note = gRNA
  misc_feature 1..20: note = DNA nucleotides
  misc_feature 1..2: note = Linked by phosphorothioate (PS) bond
  misc_feature 2..3: note = Linked by phosphorothioate (PS) bond
  misc_feature 21..61: note = RNA nucleotides
  misc_feature 60..61: note = Linked by phosphorothioate (PS) bond
  misc_feature 61: note = Modified to contain 2'-O-methyl
  source 1..61: mol_type = other DNA
ccgaagttttcttcggtttttaatttctactcttgtagatccttgtcaaggctattggtca

SEQ ID NO: 1085 - RNA, 41 nt, synthetic construct
  misc_feature 1..41: note = gRNA
  misc_feature 40..41: note = Linked by phosphorothioate (PS) bond
  misc_feature 41: note = Modified to contain 2'-O-methyl
  source 1..41: mol_type = other RNA
taatttctactcttgtagatagacagatatttgcattgaga

SEQ ID NO: 1086 - DNA, 66 bp, synthetic construct
  misc_feature 1..66: note = gRNA
  misc_feature 1..25: note = DNA nucleotides
  misc_feature 26..66: note = RNA nucleotides
  misc_feature 65..66: note = Linked by phosphorothioate (PS) bond
  misc_feature 66: note = Modified to contain 2'-O-methyl
  source 1..66: mol_type = other DNA
atgtgtttttgtcaaaagacctttttaatttctactcttgtagatagacagatatttgcattgaga

SEQ ID NO: 1087 - DNA, 61 bp, synthetic construct
  misc_feature 1..61: note = gRNA
  misc_feature 1..20: note = DNA nucleotides
  misc_feature 1..2: note = Linked by phosphorothioate (PS) bond
  misc_feature 2..3: note = Linked by phosphorothioate (PS) bond
  misc_feature 21..61: note = RNA nucleotides
  misc_feature 60..61: note = Linked by phosphorothioate (PS) bond
  misc_feature 61: note = Modified to contain 2'-O-methyl
  source 1..61: mol_type = other DNA
ccgaagttttcttcggtttttaatttctactcttgtagatagacagatatttgcattgaga

SEQ ID NO: 1088 - RNA, 41 nt, synthetic construct
  misc_feature 1..41: note = gRNA
  misc_feature 40..41: note = Linked by phosphorothioate (PS) bond
  misc_feature 41: note = Modified to contain 2'-O-methyl
  source 1..41: mol_type = other RNA
taatttctactcttgtagatcattgagatagtgtggggaag

SEQ ID NO: 1089 - DNA, 66 bp, synthetic construct
  misc_feature 1..66: note = gRNA
  misc_feature 1..25: note = DNA nucleotides
  misc_feature 26..66: note = RNA nucleotides
  misc_feature 65..66: note = Linked by phosphorothioate (PS) bond
  misc_feature 66: note = Modified to contain 2'-O-methyl
  source 1..66: mol_type = other DNA
atgtgtttttgtcaaaagacctttttaatttctactcttgtagatcattgagatagtgtggggaag

SEQ ID NO: 1090 - DNA, 61 bp, synthetic construct
  misc_feature 1..61: note = gRNA
  misc_feature 1..20: note = DNA nucleotides
  misc_feature 1..2: note = Linked by phosphorothioate (PS) bond
  misc_feature 2..3: note = Linked by phosphorothioate (PS) bond
  misc_feature 21..61: note = RNA nucleotides
  misc_feature 60..61: note = Linked by phosphorothioate (PS) bond
  misc_feature 61: note = Modified to contain 2'-O-methyl
  source 1..61: mol_type = other DNA
ccgaagttttcttcggtttttaatttctactcttgtagatcattgagatagtgtggggaag

SEQ ID NO: 1091 - RNA, 41 nt, synthetic construct
  misc_feature 1..41: note = gRNA
  misc_feature 40..41: note = Linked by phosphorothioate (PS) bond
  misc_feature 41: note = Modified to contain 2'-O-methyl
  source 1..41: mol_type = other RNA
taatttctactcttgtagatcttctcccatcatagaggata

SEQ ID NO: 1092 - DNA, 66 bp, synthetic construct
  misc_feature 1..66: note = gRNA
  misc_feature 1..25: note = DNA nucleotides
  misc_feature 26..66: note = RNA nucleotides
  misc_feature 65..66: note = Linked by phosphorothioate (PS) bond
  misc_feature 66: note = Modified to contain 2'-O-methyl
  source 1..66: mol_type = other DNA
atgtgtttttgtcaaaagacctttttaatttctactcttgtagatcttctcccatcatagaggata

SEQ ID NO: 1093 - DNA, 61 bp, synthetic construct
  misc_feature 1..61: note = gRNA
  misc_feature 1..20: note = DNA nucleotides
  misc_feature 1..2: note = Linked by phosphorothioate (PS) bond
  misc_feature 2..3: note = Linked by phosphorothioate (PS) bond
  misc_feature 21..61: note = RNA nucleotides
  misc_feature 60..61: note = Linked by phosphorothioate (PS) bond
  misc_feature 61: note = Modified to contain 2'-O-methyl
  source 1..61: mol_type = other DNA
ccgaagttttcttcggtttttaatttctactcttgtagatcttctcccatcatagaggata

SEQ ID NO: 1094 - protein, 1363 aa, synthetic construct
  REGION 1..1363: note = Cpf1
  REGION 1310..1331: note = MISC_FEATURE - NLS
  REGION 1358..1363: note = MISC_FEATURE - His tag
MTQFEGFTNLYQVSKTLRFELIPQGKTLKHIQEQGFIEEDKARNDHYKELKPIIDRIYKTYADQCLQLVQLDWENLSAAIDSYRKEKTEETRNALIEEQATYRNAIHDYFIGRTDNLTDAINKRHAEIYKGLFKAELFNGKVLKQLGTVTTTEHENALLRSFDKFTTYFSGFYENRKNVFSAEDISTAIPHRIVQDNFPKFKENCHIFTRLITAVPSLREHFENVKKAIGIFVSTSIEEVFSFPFYNQLLTQTQIDLYNQLLGGISREAGTEKIKGLNEVLNLAIQKNDETAHIIASLPHRFIPLFKQILSDRNTLSFILEEFKSDEEVIQSFCKYKTLLRNENVLETAEALFNELNSIDLTHIFISHKKLETISSALCDHWDTLRNALYERRISELTGKITKSAKEKVQRSLKHEDINLQEIISAAGKELSEAFKQKTSEILSHAHAALDQPLPTTLKKQEEKEILKSQLDSLLGLYHLLDWFAVDESNEVDPEFSARLTGIKLEMEPSLSFYNKARNYATKKPYSVEKFKLNFQRPTLASGWDVNKEKNNGAILFVKNGLYYLGIMPKQKGRYKALSFEPTEKTSEGFDKMYYDYFPDAAKMIPKCSTQLKAVTAHFQTHTTPILLSNNFIEPLEITKEIYDLNNPEKEPKKFQTAYAKKTGDQKGYREALCKWIDFTRDFLSKYTKTTSIDLSSLRPSSQYKDLGEYYAELNPLLYHISFQRIAEKEIMDAVETGKLYLFQIYNKDFAKGHHGKPNLHTLYWTGLFSPENLAKTSIKLNGQAELFYRPKSRMKRMAHRLGEKMLNKKLKDQKTPIPDTLYQELYDYVNHRLSHDLSDEARALLPNVITKEVSHEIIKDRRFTSDKFLFHVPITLNYQAANSPSKFNQRVNAYLKEHPETPIIGIDRGERNLIYITVIDSTGKILEQRSLNTIQQFDYQKKLDNREKERVAARQAWSVVGTIKDLKQGYLSQVIHEIVDLMIHYQAVVVLENLNFGFKSKRTGIAEKAVYQQFEKMLIDKLNCLVLKDYPAEKVGGVLNPYQLTDQFTSFAKMGTQSGFLFYVPAPYTSKIDPLTGFVDPFVWKTIKNHESRKHFLEGFDFLHYDVKTGDFILHFKMNRNLSFQRGLPGFMPAWDIVFEKNETQFDAKGTPFIAGKRIVPVIENHRFTGRYRDLYPANELIALLEEKGIVFRDGSNILPKLLENDDSHAIDTMVALIRSVLQMRNSNAATGEDYINSPVRDLNGVCFDSRFQNPEWPMDADANGAYHIALKGQLLLNHLKESKDLKLQNGISNQDWLAYIQELRNGRSSDDEATADSQHAAPPKKKRKVGGSGGSGGSGGSGGSGGSGGSGGSLEHHHHHH

SEQ ID NO: 1095 - protein, 1363 aa, synthetic construct
  REGION 1..1363: note = Cpf1
  REGION 1310..1331: note = MISC_FEATURE - NLS
  REGION 1358..1363: note = MISC_FEATURE - His tag
MTQFEGFTNLYQVSKTLRFELIPQGKTLKHIQEQGFIEEDKARNDHYKELKPIIDRIYKTYADQCLQLVQLDWENLSAAIDSYRKEKTEETRNALIEEQATYRNAIHDYFIGRTDNLTDAINKRHAEIYKGLFKAELFNGKVLKQLGTVTTTEHENALLRSFDKFTTYFSGFYENRKNVFSAEDISTAIPHRIVQDNFPKFKENCHIFTRLITAVPSLREHFENVKKAIGIFVSTSIEEVFSFPFYNQLLTQTQIDLYNQLLGGISREAGTEKIKGLNEVLNLAIQKNDETAHIIASLPHRFIPLFKQILSDRNTLSFILEEFKSDEEVIQSFCKYKTLLRNENVLETAEALFNELNSIDLTHIFISHKKLETISSALCDHWDTLRNALYERRISELTGKITKSAKEKVQRSLKHEDINLQEIISAAGKELSEAFKQKTSEILSHAHAALDQPLPTTLKKQEEKEILKSQLDSLLGLYHLLDWFAVDESNEVDPEFSARLTGIKLEMEPSLSFYNKARNYATKKPYSVEKFKLNFQMPTLASGWDVNKEKNNGAILFVKNGLYYLGIMPKQKGRYKALSFEPTEKTSEGFDKMYYDYFPDAAKMIPKCSTQLKAVTAHFQTHTTPILLSNNFIEPLEITKEIYDLNNPEKEPKKFQTAYAKKTGDQKGYREALCKWIDFTRDFLSKYTKTTSIDLSSLRPSSQYKDLGEYYAELNPLLYHISFQRIAEKEIMDAVETGKLYLFQIYNKDFAKGHHGKPNLHTLYWTGLFSPENLAKTSIKLNGQAELFYRPKSRMKRMAHRLGEKMLNKKLKDQKTPIPDTLYQELYDYVNHRLSHDLSDEARALLPNVITKEVSHEIIKDRRFTSDKFFFHVPITLNYQAANSPSKFNQRVNAYLKEHPETPIIGIDRGERNLIYITVIDSTGKILEQRSLNTIQQFDYQKKLDNREKERVAARQAWSVVGTIKDLKQGYLSQVIHEIVDLMIHYQAVVVLENLNFGFKSKRTGIAEKAVYQQFEKMLIDKLNCLVLKDYPAEKVGGVLNPYQLTDQFTSFAKMGTQSGFLFYVPAPYTSKIDPLTGFVDPFVWKTIKNHESRKHFLEGFDFLHYDVKTGDFILHFKMNRNLSFQRGLPGFMPAWDIVFEKNETQFDAKGTPFIAGKRIVPVIENHRFTGRYRDLYPANELIALLEEKGIVFRDGSNILPKLLENDDSHAIDTMVALIRSVLQMRNSNAATGEDYINSPVRDLNGVCFDSRFQNPEWPMDADANGAYHIALKGQLLLNHLKESKDLKLQNGISNQDWLAYIQELRNGRSSDDEATADSQHAAPPKKKRKVGGSGGSGGSGGSGGSGGSGGSGGSLEHHHHHH

SEQ ID NO: 1096 - protein, 1363 aa, synthetic construct
  REGION 1..1363: note = Cpf1
  REGION 1310..1331: note = MISC_FEATURE - NLS
  REGION 1358..1363: note = MISC_FEATURE - His tag
MTQFEGFTNLYQVSKTLRFELIPQGKTLKHIQEQGFIEEDKARNDHYKELKPIIDRIYKTYADQCLQLVQLDWENLSAAIDSYRKEKTEETRNALIEEQATYRNAIHDYFIGRTDNLTDAINKRHAEIYKGLFKAELFNGKVLKQLGTVTTTEHENALLRSFDKFTTYFSGFYENRKNVFSAEDISTAIPHRIVQDNFPKFKENCHIFTRLITAVPSLREHFENVKKAIGIFVSTSIEEVFSFPFYNQLLTQTQIDLYNQLLGGISREAGTEKIKGLNEVLNLAIQKNDETAHIIASLPHRFIPLFKQILSDRNTLSFILEEFKSDEEVIQSFCKYKTLLRNENVLETAEALFNELNSIDLTHIFISHKKLETISSALCDHWDTLRNALYERRISELTGKITKSAKEKVQRSLKHEDINLQEIISAAGKELSEAFKQKTSEILSHAHAALDQPLPTTLKKQEEKEILKSQLDSLLGLYHLLDWFAVDESNEVDPEFSARLTGIKLEMEPSLSFYNKARNYATKKPYSVEKFKLNFQRPTLASGWDVNKEKNNGAILFVKNGLYYLGIMPKQKGRYKALSFEPTEKTSEGFDKMYYDYFPDAAKMIPKCSTQLKAVTAHFQTHTTPILLSNNFIEPLEITKEIYDLNNPEKEPKKFQTAYAKKTGDQKGYREALCKWIDFTRDFLSKYTKTTSIDLSSLRPSSQYKDLGEYYAELNPLLYHISFQRIAEKEIMDAVETGKLYLFQIYNKDFAKGHHGKPNLHTLYWTGLFSPENLAKTSIKLNGQAELFYRPKSRMKRMAARLGEKMLNKKLKDQKTPIPDTLYQELYDYVNHRLSHDLSDEARALLPNVITKEVSHEIIKDRRFTSDKFLFHVPITLNYQAANSPSKFNQRVNAYLKEHPETPIIGIDRGERNLIYITVIDSTGKILEQRSLNTIQQFDYQKKLDNREKERVAARQAWSVVGTIKDLKQGYLSQVIHEIVDLMIHYQAVVVLENLNFGFKSKRTGIAEKAVYQQFEKMLIDKLNCLVLKDYPAEKVGGVLNPYQLTDQFTSFAKMGTQSGFLFYVPAPYTSKIDPLTGFVDPFVWKTIKNHESRKHFLEGFDFLHYDVKTGDFILHFKMNRNLSFQRGLPGFMPAWDIVFEKNETQFDAKGTPFIAGKRIVPVIENHRFTGRYRDLYPANELIALLEEKGIVFRDGSNILPKLLENDDSHAIDTMVALIRSVLQMRNSNAATGEDYINSPVRDLNGVCFDSRFQNPEWPMDADANGAYHIALKGQLLLNHLKESKDLKLQNGISNQDWLAYIQELRNGRSSDDEATADSQHAAPPKKKRKVGGSGGSGGSGGSGGSGGSGGSGGSLEHHHHHH

SEQ ID NO: 1097 - protein, 1331 aa, synthetic construct
  REGION 1..1331: note = Cpf1
  REGION 1310..1331: note = MISC_FEATURE - NLS
MTQFEGFTNLYQVSKTLRFELIPQGKTLKHIQEQGFIEEDKARNDHYKELKPIIDRIYKTYADQCLQLVQLDWENLSAAIDSYRKEKTEETRNALIEEQATYRNAIHDYFIGRTDNLTDAINKRHAEIYKGLFKAELFNGKVLKQLGTVTTTEHENALLRSFDKFTTYFSGFYENRKNVFSAEDISTAIPHRIVQDNFPKFKENCHIFTRLITAVPSLREHFENVKKAIGIFVSTSIEEVFSFPFYNQLLTQTQIDLYNQLLGGISREAGTEKIKGLNEVLNLAIQKNDETAHIIASLPHRFIPLFKQILSDRNTLSFILEEFKSDEEVIQSFCKYKTLLRNENVLETAEALFNELNSIDLTHIFISHKKLETISSALCDHWDTLRNALYERRISELTGKITKSAKEKVQRSLKHEDINLQEIISAAGKELSEAFKQKTSEILSHAHAALDQPLPTTLKKQEEKEILKSQLDSLLGLYHLLDWFAVDESNEVDPEFSARLTGIKLEMEPSLSFYNKARNYATKKPYSVEKFKLNFQRPTLASGWDVNKEKNNGAILFVKNGLYYLGIMPKQKGRYKALSFEPTEKTSEGFDKMYYDYFPDAAKMIPKCSTQLKAVTAHFQTHTTPILLSNNFIEPLEITKEIYDLNNPEKEPKKFQTAYAKKTGDQKGYREALCKWIDFTRDFLSKYTKTTSIDLSSLRPSSQYKDLGEYYAELNPLLYHISFQRIAEKEIMDAVETGKLYLFQIYNKDFAKGHHGKPNLHTLYWTGLFSPENLAKTSIKLNGQAELFYRPKSRMKRMAARLGEKMLNKKLKDQKTPIPDTLYQELYDYVNHRLSHDLSDEARALLPNVITKEVSHEIIKDRRFTSDKFLFHVPITLNYQAANSPSKFNQRVNAYLKEHPETPIIGIDRGERNLIYITVIDSTGKILEQRSLNTIQQFDYQKKLDNREKERVAARQAWSVVGTIKDLKQGYLSQVIHEIVDLMIHYQAVVVLENLNFGFKSKRTGIAEKAVYQQFEKMLIDKLNCLVLKDYPAEKVGGVLNPYQLTDQFTSFAKMGTQSGFLFYVPAPYTSKIDPLTGFVDPFVWKTIKNHESRKHFLEGFDFLHYDVKTGDFILHFKMNRNLSFQRGLPGFMPAWDIVFEKNETQFDAKGTPFIAGKRIVPVIENHRFTGRYRDLYPANELIALLEEKGIVFRDGSNILPKLLENDDSHAIDTMVALIRSVLQMRNSNAATGEDYINSPVRDLNGVCFDSRFQNPEWPMDADANGAYHIALKGQLLLNHLKESKDLKLQNGISNQDWLAYIQELRNGRSSDDEATADSQHAAPPKKKRKV

SEQ ID NO: 1098 - DNA, 67 bp, synthetic construct
  misc_feature 1..67: note = gRNA
  misc_feature 1..25: note = DNA nucleotides
  misc_feature 1..2: note = Linked by phosphorothioate (PS) bond
  misc_feature 2..3: note = Linked by phosphorothioate (PS) bond
  misc_feature 26..67: note = RNA nucleotides
  misc_feature 66..67: note = Linked by phosphorothioate (PS) bond
  misc_feature 66: note = Modified to contain 2'-O-methyl
  source 1..67: mol_type = other DNA
atgtgtttttgtcaaaagacctttttaatttctactcttgtagatccttgtcaaggctattggtcat

SEQ ID NO: 1099 - DNA, 68 bp, synthetic construct
  misc_feature 1..68: note = gRNA
  misc_feature 1..25: note = DNA nucleotides
  misc_feature 1..2: note = Linked by phosphorothioate (PS) bond
  misc_feature 2..3: note = Linked by phosphorothioate (PS) bond
  misc_feature 26..68: note = RNA nucleotides
  misc_feature 66..67: note = Linked by phosphorothioate (PS) bond
  misc_feature 66: note = Modified to contain 2'-O-methyl
  misc_feature 67: note = Modified to contain 2'-O-methyl
  misc_feature 67..68: note = Linked by phosphorothioate (PS) bond
  source 1..68: mol_type = other DNA
atgtgtttttgtcaaaagacctttttaatttctactcttgtagatccttgtcaaggctattggtcaat

SEQ ID NO: 1100 - DNA, 66 bp, synthetic construct; identical to SEQ ID NO: 1074
  misc_feature 1..66: note = gRNA
  misc_feature 1..25: note = DNA nucleotides
  misc_feature 1..2: note = Linked by phosphorothioate (PS) bond
  misc_feature 2..3: note = Linked by phosphorothioate (PS) bond
  misc_feature 26..66: note = RNA nucleotides
  misc_feature 65: note = Modified to contain 2'-O-methyl
  misc_feature 65..66: note = Linked by phosphorothioate (PS) bond
  source 1..66: mol_type = other DNA

SEQ ID NO: 1101 - DNA, 65 bp, synthetic construct; identical to SEQ ID NO: 1048
  misc_feature 1..65: note = gRNA
  misc_feature 1..25: note = DNA nucleotides
  misc_feature 1..2: note = Linked by phosphorothioate (PS) bond
  misc_feature 2..3: note = Linked by phosphorothioate (PS) bond
  misc_feature 26..65: note = RNA nucleotides
  misc_feature 64..65: note = Linked by phosphorothioate (PS) bond
  misc_feature 65: note = Modified to contain 2'-O-methyl
  source 1..65: mol_type = other DNA

SEQ ID NO: 1102 - DNA, 67 bp, synthetic construct
  misc_feature 1..67: note = gRNA
  misc_feature 1..25: note = DNA nucleotides
  misc_feature 1..2: note = Linked by phosphorothioate (PS) bond
  misc_feature 2..3: note = Linked by phosphorothioate (PS) bond
  misc_feature 26..67: note = RNA nucleotides
  misc_feature 65..66: note = Linked by phosphorothioate (PS) bond
  misc_feature 66..67: note = Linked by phosphorothioate (PS) bond
  misc_feature 66: note = Modified to contain 2'-O-methyl
  misc_feature 67: note = Modified to contain 2'-O-methyl
  source 1..67: mol_type = other DNA
atgtgtttttgtcaaaagacctttttaatttctactcttgtagatccttgtcaaggctattggtcaa

SEQ ID NO: 1103 - RNA, 66 nt, synthetic construct
  misc_feature 1..66: note = gRNA
  misc_feature 1..2: note = Linked by phosphorothioate (PS) bond
  misc_feature 1: note = Modified to contain 2'-O-methyl
  misc_feature 2: note = Modified to contain 2'-O-methyl
  misc_feature 2..3: note = Linked by phosphorothioate (PS) bond
  misc_feature 65..66: note = Linked by phosphorothioate (PS) bond
  misc_feature 66: note = Modified to contain 2'-O-methyl
  source 1..66: mol_type = other RNA
atgtgtttttgtcaaaagacctttttaatttctactcttgtagatccttgtcaaggctattggtca

SEQ ID NO: 1104 - RNA, 66 nt, synthetic construct
  misc_feature 1..66: note = gRNA
  misc_feature 1..2: note = Linked by phosphorothioate (PS) bond
  misc_feature 1: note = Modified to contain 2'-O-methyl
  misc_feature 2: note = Modified to contain 2'-O-methyl
  misc_feature 2..3: note = Linked by phosphorothioate (PS) bond
  misc_feature 65..66: note = Linked by phosphorothioate (PS) bond
  misc_feature 66: note = Modified to contain 2'-O-methyl
  source 1..66: mol_type = other RNA
aaaaaaaaaaaaaaaaaaaaaaaaataatttctactcttgtagatccttgtcaaggctattggtca

SEQ ID NO: 1105 - RNA, 66 nt, synthetic construct
  misc_feature 1..66: note = gRNA
  misc_feature 1..2: note = Linked by phosphorothioate (PS) bond
  misc_feature 1: note = Modified to contain 2'-O-methyl
  misc_feature 2: note = Modified to contain 2'-O-methyl
  misc_feature 2..3: note = Linked by phosphorothioate (PS) bond
  misc_feature 65..66: note = Linked by phosphorothioate (PS) bond
  misc_feature 66: note = Modified to contain 2'-O-methyl
  source 1..66: mol_type = other RNA
ttttttttttttttttttttttttttaatttctactcttgtagatccttgtcaaggctattggtca

SEQ ID NO: 1106 - DNA, 42 bp, synthetic construct
  misc_feature 1..42: note = gRNA
  misc_feature 1..2: note = Linked by phosphorothioate (PS) bond
  misc_feature 2..3: note = Linked by phosphorothioate (PS) bond
  source 1..42: mol_type = other DNA
taatttctactcttgtagatccttgtcaggctattggtcaag

SEQ ID NO: 1107 - protein, 1331 aa, synthetic construct
  REGION 1..1331: note = Cpf1
  REGION 1310..1331: note = MISC_FEATURE - NLS
STQFEGFTNLYQVSKTLRFELIPQGKTLKHIQEQGFIEEDKARNDHYKELKPIIDRIYKTYADQCLQLVQLDWENLSAAIDSYRKEKTEETRNALIEEQATYRNAIHDYFIGRTDNLTDAINKRHAEIYKGLFKAELFNGKVLKQLGTVTTTEHENALLRSFDKFTTYFSGFYENRKNVFSAEDISTAIPHRIVQDNFPKFKENCHIFTRLITAVPSLREHFENVKKAIGIFVSTSIEEVFSFPFYNQLLTQTQIDLYNQLLGGISREAGTEKIKGLNEVLNLAIQKNDETAHIIASLPHRFIPLFKQILSDRNTLSFILEEFKSDEEVIQSFCKYKTLLRNENVLETAEALFNELNSIDLTHIFISHKKLETISSALCDHWDTLRNALYERRISELTGKITKSAKEKVQRSLKHEDINLQEIISAAGKELSEAFKQKTSEILSHAHAALDQPLPTTLKKQEEKEILKSQLDSLLGLYHLLDWFAVDESNEVDPEFSARLTGIKLEMEPSLSFYNKARNYATKKPYSVEKFKLNFQRPTLASGWDVNKEKNNGAILFVKNGLYYLGIMPKQKGRYKALSFEPTEKTSEGFDKMYYDYFPDAAKMIPKCSTQLKAVTAHFQTHTTPILLSNNFIEPLEITKEIYDLNNPEKEPKKFQTAYAKKTGDQKGYREALCKWIDFTRDFLSKYTKTTSIDLSSLRPSSQYKDLGEYYAELNPLLYHISFQRIAEKEIMDAVETGKLYLFQIYNKDFAKGHHGKPNLHTLYWTGLFSPENLAKTSIKLNGQAELFYRPKSRMKRMAHRLGEKMLNKKLKDQKTPIPDTLYQELYDYVNHRLSHDLSDEARALLPNVITKEVSHEIIKDRRFTSDKFLFHVPITLNYQAANSPSKFNQRVNAYLKEHPETPIIGIDRGERNLIYITVIDSTGKILEQRSLNTIQQFDYQKKLDNREKERVAARQAWSVVGTIKDLKQGYLSQVIHEIVDLMIHYQAVVVLENLNFGFKSKRTGIAEKAVYQQFEKMLIDKLNCLVLKDYPAEKVGGVLNPYQLTDQFTSFAKMGTQSGFLFYVPAPYTSKIDPLTGFVDPFVWKTIKNHESRKHFLEGFDFLHYDVKTGDFILHFKMNRNLSFQRGLPGFMPAWDIVFEKNETQFDAKGTPFIAGKRIVPVIENHRFTGRYRDLYPANELIALLEEKGIVFRDGSNILPKLLENDDSHAIDTMVALIRSVLQMRNSNAATGEDYINSPVRDLNGVCFDSRFQNPEWPMDADANGAYHIALKGQLLLNHLKESKDLKLQNGISNQDWLAYIQELRNGRSSDDEATADSQHAAPPKKKRKV

SEQ ID NO: 1108 - protein, 1363 aa, synthetic construct
  REGION 1..1363: note = Cpf1
  REGION 1310..1331: note = MISC_FEATURE - NLS
  REGION 1358..1363: note = MISC_FEATURE - His tag
STQFEGFTNLYQVSKTLRFELIPQGKTLKHIQEQGFIEEDKARNDHYKELKPIIDRIYKTYADQCLQLVQLDWENLSAAIDSYRKEKTEETRNALIEEQATYRNAIHDYFIGRTDNLTDAINKRHAEIYKGLFKAELFNGKVLKQLGTVTTTEHENALLRSFDKFTTYFSGFYENRKNVFSAEDISTAIPHRIVQDNFPKFKENCHIFTRLITAVPSLREHFENVKKAIGIFVSTSIEEVFSFPFYNQLLTQTQIDLYNQLLGGISREAGTEKIKGLNEVLNLAIQKNDETAHIIASLPHRFIPLFKQILSDRNTLSFILEEFKSDEEVIQSFCKYKTLLRNENVLETAEALFNELNSIDLTHIFISHKKLETISSALCDHWDTLRNALYERRISELTGKITKSAKEKVQRSLKHEDINLQEIISAAGKELSEAFKQKTSEILSHAHAALDQPLPTTLKKQEEKEILKSQLDSLLGLYHLLDWFAVDESNEVDPEFSARLTGIKLEMEPSLSFYNKARNYATKKPYSVEKFKLNFQRPTLASGWDVNKEKNNGAILFVKNGLYYLGIMPKQKGRYKALSFEPTEKTSEGFDKMYYDYFPDAAKMIPKCSTQLKAVTAHFQTHTTPILLSNNFIEPLEITKEIYDLNNPEKEPKKFQTAYAKKTGDQKGYREALCKWIDFTRDFLSKYTKTTSIDLSSLRPSSQYKDLGEYYAELNPLLYHISFQRIAEKEIMDAVETGKLYLFQIYNKDFAKGHHGKPNLHTLYWTGLFSPENLAKTSIKLNGQAELFYRPKSRMKRMAHRLGEKMLNKKLKDQKTPIPDTLYQELYDYVNHRLSHDLSDEARALLPNVITKEVSHEIIKDRRFTSDKFLFHVPITLNYQAANSPSKFNQRVNAYLKEHPETPIIGIDRGERNLIYITVIDSTGKILEQRSLNTIQQFDYQKKLDNREKERVAARQAWSVVGTIKDLKQGYLSQVIHEIVDLMIHYQAVVVLENLNFGFKSKRTGIAEKAVYQQFEKMLIDKLNCLVLKDYPAEKVGGVLNPYQLTDQFTSFAKMGTQSGFLFYVPAPYTSKIDPLTGFVDPFVWKTIKNHESRKHFLEGFDFLHYDVKTGDFILHFKMNRNLSFQRGLPGFMPAWDIVFEKNETQFDAKGTPFIAGKRIVPVIENHRFTGRYRDLYPANELIALLEEKGIVFRDGSNILPKLLENDDSHAIDTMVALIRSVLQMRNSNAATGEDYINSPVRDLNGVCFDSRFQNPEWPMDADANGAYHIALKGQLLLNHLKESKDLKLQNGISNQDWLAYIQELRNGRSSDDEATADSQHAAPPKKKRKVGGSGGSGGSGGSGGSGGSGGSGGSLEHHHHHH

SEQ ID NO: 1109 - protein, 1361 aa, synthetic construct
  REGION 1..1361: note = Cpf1
  REGION 1342..1348: note = MISC_FEATURE - NLS
  REGION 1356..1361: note = MISC_FEATURE - His tag
MGRDPGKPIPNPLLGLDSTAPKKKRKVGIHGVPAATQFEGFTNLYQVSKTLRFELIPQGKTLKHIQEQGFIEEDKARNDHYKELKPIIDRIYKTYADQCLQLVQLDWENLSAAIDSYRKEKTEETRNALIEEQATYRNAIHDYFIGRTDNLTDAINKRHAEIYKGLFKAELFNGKVLKQLGTVTTTEHENALLRSFDKFTTYFSGFYENRKNVFSAEDISTAIPHRIVQDNFPKFKENCHIFTRLITAVPSLREHFENVKKAIGIFVSTSIEEVFSFPFYNQLLTQTQIDLYNQLLGGISREAGTEKIKGLNEVLNLAIQKNDETAHIIASLPHRFIPLFKQILSDRNTLSFILEEFKSDEEVIQSFCKYKTLLRNENVLETAEALFNELNSIDLTHIFISHKKLETISSALCDHWDTLRNALYERRISELTGKITKSAKEKVQRSLKHEDINLQEIISAAGKELSEAFKQKTSEILSHAHAALDQPLPTTLKKQEEKEILKSQLDSLLGLYHLLDWFAVDESNEVDPEFSARLTGIKLEMEPSLSFYNKARNYATKKPYSVEKFKLNFQMPTLASGWDVNKEKNNGAILFVKNGLYYLGIMPKQKGRYKALSFEPTEKTSEGFDKMYYDYFPDAAKMIPKCSTQLKAVTAHFQTHTTPILLSNNFIEPLEITKEIYDLNNPEKEPKKFQTAYAKKTGDQKGYREALCKWIDFTRDFLSKYTKTTSIDLSSLRPSSQYKDLGEYYAELNPLLYHISFQRIAEKEIMDAVETGKLYLFQIYNKDFAKGHHGKPNLHTLYWTGLFSPENLAKTSIKLNGQAELFYRPKSRMKRMAHRLGEKMLNKKLKDQKTPIPDTLYQELYDYVNHRLSHDLSDEARALLPNVITKEVSHEIIKDRRFTSDKFFFHVPITLNYQAANSPSKFNQRVNAYLKEHPETPIIGIDRGERNLIYITVIDSTGKILEQRSLNTIQQFDYQKKLDNREKERVAARQAWSVVGTIKDLKQGYLSQVIHEIVDLMIHYQAVVVLENLNFGFKSKRTGIAEKAVYQQFEKMLIDKLNCLVLKDYPAEKVGGVLNPYQLTDQFTSFAKMGTQSGFLFYVPAPYTSKIDPLTGFVDPFVWKTIKNHESRKHFLEGFDFLHYDVKTGDFILHFKMNRNLSFQRGLPGFMPAWDIVFEKNETQFDAKGTPFIAGKRIVPVIENHRFTGRYRDLYPANELIALLEEKGIVFRDGSNILPKLLENDDSHAIDTMVALIRSVLQMRNSNAATGEDYINSPVRDLNGVCFDSRFQNPEWPMDADANGAYHIALKGQLLLNHLKESKDLKLQNGISNQDWLAYIQELRNPKKKRKVKLAAALEHHHHHH

SEQ ID NO: 1110 - DNA, 4002 bp, synthetic construct
  misc_feature 1..4002: note = His-AsCpf1-sNLS-sNLS H800A
  misc_feature 7..24: note = His tag
  misc_feature 3955..3975: note = sNLS
  misc_feature 3982..4002: note = sNLS
  source 1..4002: mol_type = other DNA
atgggccatcatcatcaccatcacggtagcacccagtttgaaggctttaccaatctgtatcaggttagcaaaaccctgcgttttgaactgattccgcagggtaaaaccctgaaacatattcaagaacagggcttcatcgaagaggataaagcacgtaacgatcactacaaagaactgaaaccgattatcgaccgcatctataaaacgtacgcagatcagtgtctgcagctggttcagctggattgggaaaatctgagcgcagcaattgatagttatcgcaaagagaaaaccgaagaaacccgtaatgcactgattgaagaacaggcaacctatcgtaatgccatccatgattatttcattggtcgtaccgataatctgaccgatgcaattaacaaacgtcacgccgaaatctataaaggcctgtttaaagccgaactgtttaatggcaaagttctgaaacagctgggcaccgttaccaccaccgaacatgaaaatgcactgctgcgtagctttgataaattcaccacctatttcagcggcttttatgagaatcgcaaaaacgtgtttagcgcagaagatattagcaccgcaattccgcatcgtattgtgcaggataatttcccgaaattcaaagagaactgccacatttttacccgtctgattaccgcagttccgagcctgcgtgaacattttgaaaacgttaaaaaagccatcggcatctttgttagcaccagcattgaagaagtttttagcttcccgttttacaatcagctgctgacccagacacagattgatctgtataaccagctgttaggtggtattagccgtgaagcaggcaccgaaaaaatcaaaggtctgaatgaagtgctgaatctggccattcagaaaaatgatgaaaccgcacatattattgcaagcctgccgcatcgttttattccgctgtttaagcagattctgagcgatcgtaataccctgagctttattctggaagaattcaaatccgatgaagaggtgattcagagcttctgcaaatacaaaacgctgctgcgcaatgaaaatgttctggaaactgccgaagcactgtttaacgaactgaatagcattgatctgacccacatctttatcagccacaaaaaactggaaaccatttcaagcgcactgtgtgatcattgggataccctgcgtaatgccctgtatgaacgtcgtattagcgaactgaccggtaaaattaccaaaagcgcgaaagaaaaagttcagcgcagtctgaaacatgaggatattaatctgcaagagattattagcgcagccggtaaagaactgtcagaagcatttaaacagaaaaccagcgaaattctgagccatgcacatgcagcactggatcagccgctgccgaccacactgaaaaaacaagaagaaaaagagatcctgaaaagccagctggatagcctgctgggtctgtatcatctgctggactggtttgcagttgatgaaagcaatgaagttgatccggaatttagcgcacgtctgaccggcattaagctggaaatggaaccgagcctgagtttttacaataaagcccgtaattatgccaccaaaaaaccgtatagcgtggaaaaattcaagctgaacttccagatgccgacactggcaagcggttgggatgttaataaagaaaagaacaatggtgccatcctgttcgtgaaaaatggcctgtattatctgggtatcatgccgaaacagaaaggtcgttataaagcactgagctttgaaccgacagaaaaaaccagtgaaggcttcgataaaatgtactatgattactttccggacgcagccaaaatgattccgaaatgcagcacccagctgaaagcagttaccgcacattttcagacccataccacaccgattctgctgagcaataactttattgaaccgctggaaatcaccaaagagatctacgatctgaataacccggaaaaagagccgaaaaagtttcagaccgcctatgcaaaaaaaaccggtgatcagaaaggttatcgtgaagcgctgtgtaaatggattgatttcacccgtgattttctgagcaaatacaccaaaaccaccagtatcgatctgagcagcctgcgtccgagcagccagtataaagatctgggcgaatattatgcagaactgaatccgctgctgtatcatattagctttcagcgtattgccgagaaagaaataatggatgcagttgaaaccggtaagctgtacctgttccagatttataacaaagactttgccaaaggccatcatggtaaaccgaatctgcataccctgtattggaccggtctgtttagccctgaaaatctggcaaaaaccagcattaaactgaatggtcaggcggaactgttttatcgtccgaaaagccgtatgaaacgtatggcagcacgtctgggtgaaaaaatgctgaataaaaagctgaaggatcagaaaaccccgattccggatacactgtatcaagagctgtatgattatgtgaatcatcgtctgagtcatgatctgagtgatgaagcacgtgccctgctgccgaatgttattaccaaagaagttagccacgagatcattaaagatcgtcgttttaccagcgacaagttttttttccatgttccgattacgctgaattatcaggcagcaaatagcccgagcaaatttaaccagcgtgtgaatgcatatctgaaagaacatccggaaacaccgattattggtattgatcgtggtgaacgcaacctgatttatatcaccgttattgatagcaccggcaagatcctggaacagcgtagcctgaataccattcagcagtttgattatcagaaaaagctggacaaccgtgaaaaagaacgtgttgcagcccgtcaggcatggtcagttgttggtacaattaaagacctgaaacagggttatctgagccaggttattcatgaaattgtggatctgatgattcattaccaggcagttgttgtgctggaaaacctgaattttggctttaaaagcaaacgtaccggcattgcggaaaaagcagtttatcagcagttcgaaaagatgctgatcgataaactgaactgtctggtgctgaaagattatccggctgaaaaagttggcggtgttctgaatccgtatcagctgaccgatcagtttaccagctttgcaaaaatgggcacccagagcggatttctgttttatgttccggcaccgtatacgagcaaaattgatccgctgaccggttttgttgatccgtttgtttggaaaaccatcaaaaaccatgaaagccgcaaacattttctggaaggttttgatttcctgcattacgacgttaagaccggtgattttattctgcactttaagatgaatcggaacctgtcatttcagcgtggtctgcctggttttatgcctgcatgggatattgtgtttgagaaaaacgaaacacagttcgatgcaaaaggcaccccgtttattgcaggtaaacgtattgttccggtgattgaaaatcatcgtttcaccggtcgttatcgcgatctgtatccggcaaatgaactgatcgcactgctggaagagaaaggtattgtttttcgtgatggctcaaacattctgccgaaactgttagagaatgatgatagccatgccattgataccatggttgccctgattcgtagcgttctgcagatgcgtaatagcaatgcagcaaccggtgaagattacattaatagtccggttcgtgatctgaatggtgtttgttttgatagccgttttcagaatccggaatggccgatggatgcggatgcaaatggtgcatatcatattgcactgaaaggacagctgctgctgaaccacctgaaagaaagtaaagatttgaagctgcagaatggcattagcaatcaggattggctggcatatatccaagaactgcgtaacggttctcctaagaaaaagcgcaaagttggcagtccgaagaagaaacgtaaggtt

SEQ ID NO: 1111 - DNA, 4089 bp, synthetic construct
  misc_feature 1..4089: note = Cpf1
  misc_feature 3928..3993: note = NLS
  misc_feature 4072..4089: note = His tag
  source 1..4089: mol_type = other DNA
atgacccagtttgaaggtttcaccaatctgtatcaggttagcaaaaccctgcgttttgaactgattccgcagggtaaaaccctgaaacatattcaagaacagggcttcatcgaagaggataaagcacgtaacgatcactacaaagaactgaaaccgattatcgaccgcatctataaaacctatgcagatcagtgtctgcagctggttcagctggattgggaaaatctgagcgcagcaattgatagttatcgcaaagaaaaaaccgaagaaacccgtaatgcactgattgaagaacaggcaacctatcgtaatgccatccatgattatttcattggtcgtaccgataatctgaccgatgcaattaacaaacgtcacgccgaaatctataaaggcctgtttaaagccgaactgtttaatggcaaagttctgaaacagctgggcaccgttaccaccaccgaacatgaaaatgcactgctgcgtagctttgataaattcaccacctatttcagcggcttttatgagaatcgcaaaaacgtgtttagcgcagaagatattagcaccgcaattccgcatcgtattgtgcaggataatttcccgaaattcaaagagaactgccacatttttacccgtctgattaccgcagttccgagcctgcgtgaacattttgaaaacgttaaaaaagccatcggcatctttgttagcaccagcattgaagaagtttttagcttcccgttttacaatcagctgctgacccagacccagattgatctgtataaccaactgctgggtggtattagccgtgaagcaggcaccgaaaaaatcaaaggtctgaatgaagtgctgaatctggccattcagaaaaatgatgaaaccgcacatattattgcaagcctgccgcatcgttttattccgctgttcaaacaaattctgagcgatcgtaataccctgagctttattctggaagaattcaaatccgatgaagaggtgattcagagcttttgcaaatacaaaacgctgctgcgcaatgaaaatgttctggaaactgccgaagcactgtttaacgaactgaatagcattgatctgacccacatctttatcagccacaaaaaactggaaaccatttcaagcgcactgtgtgatcattgggataccctgcgtaatgccctgtatgaacgtcgtattagcgaactgaccggtaaaattaccaaaagcgcgaaagaaaaagttcagcgcagtctgaaacatgaggatattaatctgcaagagattattagcgcagccggtaaagaactgtcagaagcatttaaacagaaaaccagcgaaattctgtcacatgcacatgcagcactggatcagccgctgccgaccaccctgaaaaaacaagaagaaaaagaaatcctgaaaagccagctggatagcctgctgggtctgtatcatctgctggactggtttgcagttgatgaaagcaatgaagttgatccggaatttagcgcacgtctgaccggcattaaactggaaatggaaccgagcctgagcttttataacaaagcccgtaattatgccaccaaaaaaccgtatagcgtcgaaaaattcaaactgaactttcagcgtccgaccctggcaagcggttgggatgttaataaagaaaaaaacaacggtgccatcctgttcgtgaaaaatggcctgtattatctgggtattatgccgaaacagaaaggtcgttataaagcgctgagctttgaaccgacggaaaaaaccagtgaaggttttgataaaatgtactacgactattttccggatgcagccaaaatgattccgaaatgtagcacccagctgaaagcagttaccgcacattttcagacccataccaccccgattctgctgagcaataactttattgaaccgctggaaatcaccaaagagatctacgatctgaataacccggaaaaagagccgaaaaaattccagaccgcatatgcaaaaaaaaccggtgatcagaaaggttatcgtgaagcgctgtgtaaatggattgatttcacccgtgattttctgagcaaatacaccaaaaccaccagtatcgatctgagcagcctgcgtccgagcagccagtataaagatctgggcgaatattatgcagaactgaatccgctgctgtatcatattagctttcagcgtattgccgagaaagaaatcatggacgcagttgaaaccggtaaactgtacctgttccagatctacaataaagattttgccaaaggccatcatggcaaaccgaatctgcataccctgtattggaccggtctgtttagccctgaaaatctggcaaaaacctcgattaaactgaatggtcaggcggaactgttttatcgtccgaaaagccgtatgaaacgtatggcacatcgtctgggtgaaaaaatgctgaacaaaaaactgaaagaccagaaaaccccgatcccggatacactgtatcaagaactgtatgattatgtgaaccatcgtctgagccatgatctgagtgatgaagcacgtgccctgctgccgaatgttattaccaaagaagttagccacgagatcattaaagatcgtcgttttaccagcgacaaattcctgtttcatgtgccgattaccctgaattatcaggcagcaaatagcccgagcaaatttaaccagcgtgttaatgcatatctgaaagaacatccagaaacgccgattattggtattgatcgtggtgaacgtaacctgatttatatcaccgttattgatagcaccggcaaaatcctggaacagcgtagcctgaataccattcagcagtttgattaccagaaaaaactggataatcgcgagaaagaacgtgttgcagcacgtcaggcatggtcagttgttggtacaattaaagacctgaaacagggttatctgagccaggttattcatgaaattgtggatctgatgattcactatcaggccgttgttgtgctggaaaacctgaattttggctttaaaagcaaacgtaccggcattgcagaaaaagcagtttatcagcagttcgagaaaatgctgattgacaaactgaattgcctggtgctgaaagattatccggctgaaaaagttggtggtgttctgaatccgtatcagctgaccgatcagtttaccagctttgcaaaaatgggcacccagagcggatttctgttttatgttccggcaccgtatacgagcaaaattgatccgctgaccggttttgttgatccgtttgtttggaaaaccatcaaaaaccatgaaagccgcaaacattttctggaaggtttcgattttctgcattacgacgttaaaacgggtgatttcatcctgcactttaaaatgaatcgcaatctgagttttcagcgtggcctgcctggttttatgcctgcatgggatattgtgtttgagaaaaacgaaacacagttcgatgcaaaaggcaccccgtttattgcaggtaaacgtattgttccggtgattgaaaatcatcgtttcaccggtcgttatcgcgatctgtatccggcaaatgaactgatcgcactgctggaagagaaaggtattgtttttcgtgatggctcaaacattctgccgaaactgctggaaaatgatgatagccatgcaattgataccatggttgcactgattcgtagcgttctgcagatgcgtaatagcaatgcagcaaccggtgaagattacattaatagtccggttcgtgatctgaatggtgtttgttttgatagccgttttcagaatccggaatggccgatggatgcagatgcaaatggtgcatatcatattgcactgaaaggacagctgctgctgaaccacctgaaagaaagcaaagatctgaaactgcaaaacggcattagcaatcaggattggctggcatatatccaagaactgcgtaacggtcgtagcagtgatgatgaagcaaccgcagatagccagcatgcagcaccgcctaaaaagaaacgtaaagttggtggtagcggtggttcaggtggtagtggcggtagtggtggctcagggggttctggtggctctggtggtagcctcgagcaccaccaccaccaccac

SEQ ID NO: 1112 - DNA, 4089 bp, synthetic construct
  misc_feature 1..4089: note = Cpf1
  misc_feature 3928..3993: note = NLS
  misc_feature 4072..4089: note = His tag
  source 1..4089: mol_type = other DNA
atgacccagtttgaaggtttcaccaatctgtatcaggttagcaaaaccctgcgttttgaactgattccgcagggtaaaaccctgaaacatattcaagaacagggcttcatcgaagaggataaagcacgtaacgatcactacaaagaactgaaaccgattatcgaccgcatctataaaacctatgcagatcagtgtctgcagctggttcagctggattgggaaaatctgagcgcagcaattgatagttatcgcaaagaaaaaaccgaagaaacccgtaatgcactgattgaagaacaggcaacctatcgtaatgccatccatgattatttcattggtcgtaccgataatctgaccgatgcaattaacaaacgtcacgccgaaatctataaaggcctgtttaaagccgaactgtttaatggcaaagttctgaaacagctgggcaccgttaccaccaccgaacatgaaaatgcactgctgcgtagctttgataaattcaccacctatttcagcggcttttatgagaatcgcaaaaacgtgtttagcgcagaagatattagcaccgcaattccgcatcgtattgtgcaggataatttcccgaaattcaaagagaactgccacatttttacccgtctgattaccgcagttccgagcctgcgtgaacattttgaaaacgttaaaaaagccatcggcatctttgttagcaccagcattgaagaagtttttagcttcccgttttacaatcagctgctgacccagacccagattgatctgtataaccaactgctgggtggtattagccgtgaagcaggcaccgaaaaaatcaaaggtctgaatgaagtgctgaatctggccattcagaaaaatgatgaaaccgcacatattattgcaagcctgccgcatcgttttattccgctgttcaaacaaattctgagcgatcgtaataccctgagctttattctggaagaattcaaatccgatgaagaggtgattcagagcttttgcaaatacaaaacgctgctgcgcaatgaaaatgttctggaaactgccgaagcactgtttaacgaactgaatagcattgatctgacccacatctttatcagccacaaaaaactggaaaccatttcaagcgcactgtgtgatcattgggataccctgcgtaatgccctgtatgaacgtcgtattagcgaactgaccggtaaaattaccaaaagcgcgaaagaaaaagttcagcgcagtctgaaacatgaggatattaatctgcaagagattattagcgcagccggtaaagaactgtcagaagcatttaaacagaaaaccagcgaaattctgtcacatgcacatgcagcactggatcagccgctgccgaccaccctgaaaaaacaagaagaaaaagaaatcctgaaaagccagctggatagcctgctgggtctgtatcatctgctggactggtttgcagttgatgaaagcaatgaagttgatccggaatttagcgcacgtctgaccggcattaaactggaaatggaaccgagcctgagcttttataacaaagcccgtaattatgccaccaaaaaaccgtatagcgtcgaaaaattcaaactgaactttcagatgccgaccctggcaagcggttgggatgttaataaagaaaaaaacaacggtgccatcctgttcgtgaaaaatggcctgtattatctgggtattatgccgaaacagaaaggtcgttataaagcgctgagctttgaaccgacggaaaaaaccagtgaaggttttgataaaatgtactacgactattttccggatgcagccaaaatgattccgaaatgtagcacccagctgaaagcagttaccgcacattttcagacccataccaccccgattctgctgagcaataactttattgaaccgctggaaatcaccaaagagatctacgatctgaataacccggaaaaagagccgaaaaaattccagaccgcatatgcaaaaaaaaccggtgatcagaaaggttatcgtgaagcgctgtgtaaatggattgatttcacccgtgattttctgagcaaatacaccaaaaccaccagtatcgatctgagcagcctgcgtccgagcagccagtataaagatctgggcgaatattatgcagaactgaatccgctgctgtatcatattagctttcagcgtattgccgagaaagaaatcatggacgcagttgaaaccggtaaactgtacctgttccagatctacaataaagattttgccaaaggccatcatggcaaaccgaatctgcataccctgtattggaccggtctgtttagccctgaaaatctggcaaaaacctcgattaaactgaatggtcaggcggaactgttttatcgtccgaaaagccgtatgaaacgtatggcacatcgtctgggtgaaaaaatgctgaacaaaaaactgaaagaccagaaaaccccgatcccggatacactgtatcaagaactgtatgattatgtgaaccatcgtctgagccatgatctgagtgatgaagcacgtgccctgctgccgaatgttattaccaaagaagttagccacgagatcattaaagatcgtcgttttaccagcgacaaattcttttttcatgtgccgattaccctgaattatcaggcagcaaatagcccgagcaaatttaaccagcgtgttaatgcatatctgaaagaacatccagaaacgccgattattggtattgatcgtggtgaacgtaacctgatttatatcaccgttattgatagcaccggcaaaatcctggaacagcgtagcctgaataccattcagcagtttgattaccagaaaaaactggataatcgcgagaaagaacgtgttgcagcacgtcaggcatggtcagttgttggtacaattaaagacctgaaacagggttatctgagccaggttattcatgaaattgtggatctgatgattcactatcaggccgttgttgtgctggaaaacctgaattttggctttaaaagcaaacgtaccggcattgcagaaaaagcagtttatcagcagttcgagaaaatgctgattgacaaactgaattgcctggtgctgaaagattatccggctgaaaaagttggtggtgttctgaatccgtatcagctgaccgatcagtttaccagctttgcaaaaatgggcacccagagcggatttctgttttatgttccggcaccgtatacgagcaaaattgatccgctgaccggttttgttgatccgtttgtttggaaaaccatcaaaaaccatgaaagccgcaaacattttctggaaggtttcgattttctgcattacgacgttaaaacgggtgatttcatcctgcactttaaaatgaatcgcaatctgagttttcagcgtggcctgcctggttttatgcctgcatgggatattgtgtttgagaaaaacgaaacacagttcgatgcaaaaggcaccccgtttattgcaggtaaacgtattgttccggtgattgaaaatcatcgtttcaccggtcgttatcgcgatctgtatccggcaaatgaactgatcgcactgctggaagagaaaggtattgtttttcgtgatggctcaaacattctgccgaaactgctggaaaatgatgatagccatgcaattgataccatggttgcactgattcgtagcgttctgcagatgcgtaatagcaatgcagcaaccggtgaagattacattaatagtccggttcgtgatctgaatggtgtttgttttgatagccgttttcagaatccggaatggccgatggatgcagatgcaaatggtgcatatcatattgcactgaaaggacagctgctgctgaaccacctgaaagaaagcaaagatctgaaactgcaaaacggcattagcaatcaggattggctggcatatatccaagaactgcgtaacggtcgtagcagtgatgatgaagcaaccgcagatagccagcatgcagcaccgcctaaaaagaaacgtaaagttggtggtagcggtggttcaggtggtagtggcggtagtggtggctcagggggttctggtggctctggtggtagcctcgagcaccaccaccaccaccac

SEQ ID NO: 1113 - DNA, 4089 bp, synthetic construct
  misc_feature 1..4089: note = Cpf1
  misc_feature 3928..3993: note = NLS
  misc_feature 4072..4089: note = His tag
  source 1..4089: mol_type = other DNA
atgacccagtttgaaggtttcaccaatctgtatcaggttagcaaaaccctgcgttttgaactgattccgcagggtaaaaccctgaaacatattcaagaacagggcttcatcgaagaggataaagcacgtaacgatcactacaaagaactgaaaccgattatcgaccgcatctataaaacctatgcagatcagtgtctgcagctggttcagctggattgggaaaatctgagcgcagcaattgatagttatcgcaaagaaaaaaccgaagaaacccgtaatgcactgattgaagaacaggcaacctatcgtaatgccatccatgattatttcattggtcgtaccgataatctgaccgatgcaattaacaaacgtcacgccgaaatctataaaggcctgtttaaagccgaactgtttaatggcaaagttctgaaacagctgggcaccgttaccaccaccgaacatgaaaatgcactgctgcgtagctttgataaattcaccacctatttcagcggcttttatgagaatcgcaaaaacgtgtttagcgcagaagatattagcaccgcaattccgcatcgtattgtgcaggataatttcccgaaattcaaagagaactgccacatttttacccgtctgattaccgcagttccgagcctgcgtgaacattttgaaaacgttaaaaaagccatcggcatctttgttagcaccagcattgaagaagtttttagcttcccgttttacaatcagctgctgacccagacccagattgatctgtataaccaactgctgggtggtattagccgtgaagcaggcaccgaaaaaatcaaaggtctgaatgaagtgctgaatctggccattcagaaaaatgatgaaaccgcacatattattgcaagcctgccgcatcgttttattccgctgttcaaacaaattctgagcgatcgtaataccctgagctttattctggaagaattcaaatccgatgaagaggtgattcagagcttttgcaaatacaaaacgctgctgcgcaatgaaaatgttctggaaactgccgaagcactgtttaacgaactgaatagcattgatctgacccacatctttatcagccacaaaaaactggaaaccatttcaagcgcactgtgtgatcattgggataccctgcgtaatgccctgtatgaacgtcgtattagcgaactgaccggtaaaattaccaaaagcgcgaaagaaaaagttcagcgcagtctgaaacatgaggatattaatctgcaagagattattagcgcagccggtaaagaactgtcagaagcatttaaacagaaaaccagcgaaattctgtcacatgcacatgcagcactggatcagccgctgccgaccaccctgaaaaaacaagaagaaaaagaaatcctgaaaagccagctggatagcctgctgggtctgtatcatctgctggactggtttgcagttgatgaaagcaatgaagttgatccggaatttagcgcacgtctgaccggcattaaactggaaatggaaccgagcctgagcttttataacaaagcccgtaattatgccaccaaaaaaccgtatagcgtcgaaaaattcaaactgaactttcagcgtccgaccctggcaagcggttgggatgttaataaagaaaaaaacaacggtgccatcctgttcgtgaaaaatggcctgtattatctgggtattatgccgaaacagaaaggtcgttataaagcgctgagctttgaaccgacggaaaaaaccagtgaaggttttgataaaatgtactacgactattttccggatgcagccaaaatgattccgaaatgtagcacccagctgaaagcagttaccgcacattttcagacccataccaccccgattctgctgagcaataactttattgaaccgctggaaatcaccaaagagatctacgatctgaataacccggaaaaagagccgaaaaaattccagaccgcatatgcaaaaaaaaccggtgatcagaaaggttatcgtgaagcgctgtgtaaatggattgatttcacccgtgattttctgagcaaatacaccaaaaccaccagtatcgatctgagcagcctgcgtccgagcagccagtataaagatctgggcgaatattatgcagaactgaatccgctgctgtatcatattagctttcagcgtattgccgagaaagaaatcatggacgcagttgaaaccggtaaactgtacctgttccagatctacaataaagattttgccaaaggccatcatggcaaaccgaatctgcataccctgtattggaccggtctgtttagccctgaaaatctggcaaaaacctcgattaaactgaatggtcaggcggaactgttttatcgtccgaaaagccgtatgaaacgtatggcagctcgtctgggtgaaaaaatgctgaacaaaaaactgaaagaccagaaaaccccgatcccggatacactgtatcaagaactgtatgattatgtgaaccatcgtctgagccatgatctgagtgatgaagcacgtgccctgctgccgaatgttattaccaaagaagttagccacgagatcattaaagatcgtcgttttaccagcgacaaattcctgtttcatgtgccgattaccctgaattatcaggcagcaaatagcccgagcaaatttaaccagcgtgttaatgcatatctgaaagaacatccagaaacgccgattattggtattgatcgtggtgaacgtaacctgatttatatcaccgttattgatagcaccggcaaaatcctggaacagcgtagcctgaataccattcagcagtttgattaccagaaaaaactggataatcgcgagaaagaacgtgttgcagcacgtcaggcatggtcagttgttggtacaattaaagacctgaaacagggttatctgagccaggttattcatgaaattgtggatctgatgattcactatcaggccgttgttgtgctggaaaacctgaattttggctttaaaagcaaacgtaccggcattgcagaaaaagcagtttatcagcagttcgagaaaatgctgattgacaaactgaattgcctggtgctgaaagattatccggctgaaaaagttggtggtgttctgaatccgtatcagctgaccgatcagtttaccagctttgcaaaaatgggcacccagagcggatttctgttttatgttccggcaccgtatacgagcaaaattgatccgctgaccggttttgttgatccgtttgtttggaaaaccatcaaaaaccatgaaagccgcaaacattttctggaaggtttcgattttctgcattacgacgttaaaacgggtgatttcatcctgcactttaaaatgaatcgcaatctgagttttcagcgtggcctgcctggttttatgcctgcatgggatattgtgtttgagaaaaacgaaacacagttcgatgcaaaaggcaccccgtttattgcaggtaaacgtattgttccggtgattgaaaatcatcgtttcaccggtcgttatcgcgatctgtatccggcaaatgaactgatcgcactgctggaagagaaaggtattgtttttcgtgatggctcaaacattctgccgaaactgctggaaaatgatgatagccatgcaattgataccatggttgcactgattcgtagcgttctgcagatgcgtaatagcaatgcagcaaccggtgaagattacattaatagtccggttcgtgatctgaatggtgtttgttttgatagccgttttcagaatccggaatggccgatggatgcagatgcaaatggtgcatatcatattgcactgaaaggacagctgctgctgaaccacctgaaagaaagcaaagatctgaaactgcaaaacggcattagcaatcaggattggctggcatatatccaagaactgcgtaacggtcgtagcagtgatgatgaagcaaccgcagatagccagcatgcagcaccgcctaaaaagaaacgtaaagttggtggtagcggtggttcaggtggtagtggcggtagtggtggctcagggggttctggtggctctggtggtagcctcgagcaccaccaccaccaccac

SEQ ID NO: 1114 - DNA, 3993 bp, synthetic construct
  misc_feature 1..3993: note = Cpf1
  misc_feature 3928..3993: note = NLS
  source 1..3993: mol_type = other DNA
atgacccagtttgaaggtttcaccaatctgtatcaggttagcaaaaccctgcgttttgaactgattccgcagggtaaaaccctgaaacatattcaagaacagggcttcatcgaagaggataaagcacgtaacgatcactacaaagaactgaaaccgattatcgaccgcatctataaaacctatgcagatcagtgtctgcagctggttcagctggattgggaaaatctgagcgcagcaattgatagttatcgcaaagaaaaaaccgaagaaacccgtaatgcactgattgaagaacaggcaacctatcgtaatgccatccatgattatttcattggtcgtaccgataatctgaccgatgcaattaacaaacgtcacgccgaaatctataaaggcctgtttaaagccgaactgtttaatggcaaagttctgaaacagctgggcaccgttaccaccaccgaacatgaaaatgcactgctgcgtagctttgataaattcaccacctatttcagcggcttttatgagaatcgcaaaaacgtgtttagcgcagaagatattagcaccgcaattccgcatcgtattgtgcaggataatttcccgaaattcaaagagaactgccacatttttacccgtctgattaccgcagttccgagcctgcgtgaacattttgaaaacgttaaaaaagccatcggcatctttgttagcaccagcattgaagaagtttttagcttcccgttttacaatcagctgctgacccagacccagattgatctgtataaccaactgctgggtggtattagccgtgaagcaggcaccgaaaaaatcaaaggtctgaatgaagtgctgaatctggccattcagaaaaatgatgaaaccgcacatattattgcaagcctgccgcatcgttttattccgctgttcaaacaaattctgagcgatcgtaataccctgagctttattctggaagaattcaaatccgatgaagaggtgattcagagcttttgcaaatacaaaacgctgctgcgcaatgaaaatgttctggaaactgccgaagcactgtttaacgaactgaatagcattgatctgacccacatctttatcagccacaaaaaactggaaaccatttcaagcgcactgtgtgatcattgggataccctgcgtaatgccctgtatgaacgtcgtattagcgaactgaccggtaaaattaccaaaagcgcgaaagaaaaagttcagcgcagtctgaaacatgaggatattaatctgcaagagattattagcgcagccggtaaagaactgtcagaagcatttaaacagaaaaccagcgaaattctgtcacatgcacatgcagcactggatcagccgctgccgaccaccctgaaaaaacaagaagaaaaagaaatcctgaaaagccagctggatagcctgctgggtctgtatcatctgctggactggtttgcagttgatgaaagcaatgaagttgatccggaatttagcgcacgtctgaccggcattaaactggaaatggaaccgagcctgagcttttataacaaagcccgtaattatgccaccaaaaaaccgtatagcgtcgaaaaattcaaactgaactttcagcgtccgaccctggcaagcggttgggatgttaataaagaaaaaaacaacggtgccatcctgttcgtgaaaaatggcctgtattatctgggtattatgccgaaacagaaaggtcgttataaagcgctgagctttgaaccgacggaaaaaaccagtgaaggttttgataaaatgtactacgactattttccggatgcagccaaaatgattccgaaatgtagcacccagctgaaagcagttaccgcacattttcagacccataccaccccgattctgctgagcaataactttattgaaccgctggaaatcaccaaagagatctacgatctgaataacccggaaaaagagccgaaaaaattccagaccgcatatgcaaaaaaaaccggtgatcagaaaggttatcgtgaagcgctgtgtaaatggattgatttcacccgtgattttctgagcaaatacaccaaaaccaccagtatcgatctgagcagcctgcgtccgagcagccagtataaagatctgggcgaatattatgcagaactgaatccgctgctgtatcatattagctttcagcgtattgccgagaaagaaatcatggacgcagttgaaaccggtaaactgtacctgttccagatctacaataaagattttgccaaaggccatcatggcaaaccgaatctgcataccctgtattggaccggtctgtttagccctgaaaatctggcaaaaacctcgattaaactgaatggtcaggcggaactgttttatcgtccgaaaagccgtatgaaacgtatggcagctcgtctgggtgaaaaaatgctgaacaaaaaactgaaagaccagaaaaccccgatcccggatacactgtatcaagaactgtatgattatgtgaaccatcgtctgagccatgatctgagtgatgaagcacgtgccctgctgccgaatgttattaccaaagaagttagccacgagatcattaaagatcgtcgttttaccagcgacaaattcctgtttcatgtgccgattaccctgaattatcaggcagcaaatagcccgagcaaatttaaccagcgtgttaatgcatatctgaaagaacatccagaaacgccgattattggtattgatcgtggtgaacgtaacctgatttatatcaccgttattgatagcaccggcaaaatcctggaacagcgtagcctgaataccattcagcagtttgattaccagaaaaaactggataatcgcgagaaagaacgtgttgcagcacgtcaggcatggtcagttgttggtacaattaaagacctgaaacagggttatctgagccaggttattcatgaaattgtggatctgatgattcactatcaggccgttgttgtgctggaaaacctgaattttggctttaaaagcaaacgtaccggcattgcagaaaaagcagtttatcagcagttcgagaaaatgctgattgacaaactgaattgcctggtgctgaaagattatccggctgaaaaagttggtggtgttctgaatccgtatcagctgaccgatcagtttaccagctttgcaaaaatgggcacccagagcggatttctgttttatgttccggcaccgtatacgagcaaaattgatccgctgaccggttttgttgatccgtttgtttggaaaaccatcaaaaaccatgaaagccgcaaacattttctggaaggtttcgattttctgcattacgacgttaaaacgggtgatttcatcctgcactttaaaatgaatcgcaatctgagttttcagcgtggcctgcctggttttatgcctgcatgggatattgtgtttgagaaaaacgaaacacagttcgatgcaaaaggcaccccgtttattgcaggtaaacgtattgttccggtgattgaaaatcatcgtttcaccggtcgttatcgcgatctgtatccggcaaatgaactgatcgcactgctggaagagaaaggtattgtttttcgtgatggctcaaacattctgccgaaactgctggaaaatgatgatagccatgcaattgataccatggttgcactgattcgtagcgttctgcagatgcgtaatagcaatgcagcaaccggtgaagattacattaatagtccggttcgtgatctgaatggtgtttgttttgatagccgttttcagaatccggaatggccgatggatgcagatgcaaatggtgcatatcatattgcactgaaaggacagctgctgctgaaccacctgaaagaaagcaaagatctgaaactgcaaaacggcattagcaatcaggattggctggcatatatccaagaactgcgtaacggtcgtagcagtgatgatgaagcaaccgcagatagccagcatgcagcaccgcctaaaaagaaacgtaaagtt

SEQ ID NO: 1115 - DNA, 3993 bp, synthetic construct
  misc_feature 1..3993: note = Cpf1
  misc_feature 3928..3993: note = NLS
  source 1..3993: mol_type = other DNA
agcacccagtttgaaggtttcaccaatctgtatcaggttagcaaaaccctgcgttttgaactgattccgcagggtaaaaccctgaaacatattcaagaacagggcttcatcgaagaggataaagcacgtaacgatcactacaaagaactgaaaccgattatcgaccgcatctataaaacctatgcagatcagtgtctgcagctggttcagctggattgggaaaatctgagcgcagcaattgatagttatcgcaaagaaaaaaccgaagaaacccgtaatgcactgattgaagaacaggcaacctatcgtaatgccatccatgattatttcattggtcgtaccgataatctgaccgatgcaattaacaaacgtcacgccgaaatctataaaggcctgtttaaagccgaactgtttaatggcaaagttctgaaacagctgggcaccgttaccaccaccgaacatgaaaatgcactgctgcgtagctttgataaattcaccacctatttcagcggcttttatgagaatcgcaaaaacgtgtttagcgcagaagatattagcaccgcaattccgcatcgtattgtgcaggataatttcccgaaattcaaagagaactgccacatttttacccgtctgattaccgcagttccgagcctgcgtgaacattttgaaaacgttaaaaaagccatcggcatctttgttagcaccagcattgaagaagtttttagcttcccgttttacaatcagctgctgacccagacccagattgatctgtataaccaactgctgggtggtattagccgtgaagcaggcaccgaaaaaatcaaaggtctgaatgaagtgctgaatctggccattcagaaaaatgatgaaaccgcacatattattgcaagcctgccgcatcgttttattccgctgttcaaacaaattctgagcgatcgtaataccctgagctttattctggaagaattcaaatccgatgaagaggtgattcagagcttttgcaaatacaaaacgctgctgcgcaatgaaaatgttctggaaactgccgaagcactgtttaacgaactgaatagcattgatctgacccacatctttatcagccacaaaaaactggaaaccatttcaagcgcactgtgtgatcattgggataccctgcgtaatgccctgtatgaacgtcgtattagcgaactgaccggtaaaattaccaaaagcgcgaaagaaaaagttcagcgcagtctgaaacatgaggatattaatctgcaagagattattagcgcagccggtaaagaactgtcagaagcatttaaacagaaaaccagcgaaattctgtcacatgcacatgcagcactggatcagccgctgccgaccaccctgaaaaaacaagaagaaaaagaaatcctgaaaagccagctggatagcctgctgggtctgtatcatctgctggactggtttgcagttgatgaaagcaatgaagttgatccggaatttagcgcacgtctgaccggcattaaactggaaatggaaccgagcctgagcttttataacaaagcccgtaattatgccaccaaaaaaccgtatagcgtcgaaaaattcaaactgaactttcagcgtccgaccctggcaagcggttgggatgttaataaagaaaaaaacaacggtgccatcctgttcgtgaaaaatggcctgtattatctgggtattatgccgaaacagaaaggtcgttataaagcgctgagctttgaaccgacggaaaaaaccagtgaaggttttgataaaatgtactacgactattttccggatgcagccaaaatgattccgaaatgtagcacccagctgaaagcagttaccgcacattttcagacccataccaccccgattctgctgagcaataactttattgaaccgctggaaatcaccaaagagatctacgatctgaataacccggaaaaagagccgaaaaaattccagaccgcatatgcaaaaaaaaccggtgatcagaaaggttatcgtgaagcgctgtgtaaatggattgatttcacccgtgattttctgagcaaatacaccaaaaccaccagtatcgatctgagcagcctgcgtccgagcagccagtataaagatctgggcgaatattatgcagaactgaatccgctgctgtatcatattagctttcagcgtattgccgagaaagaaatcatggacgcagttgaaaccggtaaactgtacctgttccagatctacaataaagattttgccaaaggccatcatggcaaaccgaatctgcataccctgtattggaccggtctgtttagccctgaaaatctggcaaaaacctcgattaaactgaatggtcaggcggaactgttttatcgtccgaaaagccgtatgaaacgtatggcacatcgtctgggtgaaaaaatgctgaacaaaaaactgaaagaccagaaaaccccgatcccggatacactgtatcaagaactgtatgattatgtgaaccatcgtctgagccatgatctgagtgatgaagcacgtgccctgctgccgaatgttattaccaaagaagttagccacgagatcattaaagatcgtcgttttaccagcgacaaattcctgtttcatgtgccgattaccctgaattatcaggcagcaaatagcccgagcaaatttaaccagcgtgttaatgcatatctgaaagaacatccagaaacgccgattattggtattgatcgtggtgaacgtaacctgatttatatcaccgttattgatagcaccggcaaaatcctggaacagcgtagcctgaataccattcagcagtttgattaccagaaaaaactggataatcgcgagaaagaacgtgttgcagcacgtcaggcatggtcagttgttggtacaattaaagacctgaaacagggttatctgagccaggttattcatgaaattgtggatctgatgattcactatcaggccgttgttgtgctggaaaacctgaattttggctttaaaagcaaacgtaccggcattgcagaaaaagcagtttatcagcagttcgagaaaatgctgattgacaaactgaattgcctggtgctgaaagattatccggctgaaaaagttggtggtgttctgaatccgtatcagctgaccgatcagtttaccagctttgcaaaaatgggcacccagagcggatttctgttttatgttccggcaccgtatacgagcaaaattgatccgctgaccggttttgttgatccgtttgtttggaaaaccatcaaaaaccatgaaagccgcaaacattttctggaaggtttcgattttctgcattacgacgttaaaacgggtgatttcatcctgcactttaaaatgaatcgcaatctgagttttcagcgtggcctgcctggttttatgcctgcatgggatattgtgtttgagaaaaacgaaacacagttcgatgcaaaaggcaccccgtttattgcaggtaaacgtattgttccggtgattgaaaatcatcgtttcaccggtcgttatcgcgatctgtatccggcaaatgaactgatcgcactgctggaagagaaaggtattgtttttcgtgatggctcaaacattctgccgaaactgctggaaaatgatgatagccatgcaattgataccatggttgcactgattcgtagcgttctgcagatgcgtaatagcaatgcagcaaccggtgaagattacattaatagtccggttcgtgatctgaatggtgtttgttttgatagccgttttcagaatccggaatggccgatggatgcagatgcaaatggtgcatatcatattgcactgaaaggacagctgctgctgaaccacctgaaagaaagcaaagatctgaaactgcaaaacggcattagcaatcaggattggctggcatatatccaagaactgcgtaacggtcgtagcagtgatgatgaagcaaccgcagatagccagcatgcagcaccgcctaaaaagaaacgtaaagtt

SEQ ID NO: 1116 - DNA, 4089 bp, synthetic construct
  misc_feature 1..4089: note = Cpf1
  misc_feature 3928..3993: note = NLS
  misc_feature 4072..4089: note = His tag
  source 1..4089: mol_type = other DNA
agcacccagtttgaaggtttcaccaatctgtatcaggttagcaaaaccctgcgttttgaactgattccgcagggtaaaaccctgaaacatattcaagaacagggcttcatcgaagaggataaagcacgtaacgatcactacaaagaactgaaaccgattatcgaccgcatctataaaacctatgcagatcagtgtctgcagctggttcagctggattgggaaaatctgagcgcagcaattgatagttatcgcaaagaaaaaaccgaagaaacccgtaatgcactgattgaagaacaggcaacctatcgtaatgccatccatgattatttcattggtcgtaccgataatctgaccgatgcaattaacaaacgtcacgccgaaatctataaaggcctgtttaaagccgaactgtttaatggcaaagttctgaaacagctgggcaccgttaccaccaccgaacatgaaaatgcactgctgcgtagctttgataaattcaccacctatttcagcggcttttatgagaatcgcaaaaacgtgtttagcgcagaagatattagcaccgcaattccgcatcgtattgtgcaggataatttcccgaaattcaaagagaactgccacatttttacccgtctgattaccgcagttccgagcctgcgtgaacattttgaaaacgttaaaaaagccatcggcatctttgttagcaccagcattgaagaagtttttagcttcccgttttacaatcagctgctgacccagacccagattgatctgtataaccaactgctgggtggtattagccgtgaagcaggcaccgaaaaaatcaaaggtctgaatgaagtgctgaatctggccattcagaaaaatgatgaaaccgcacatattattgcaagcctgccgcatcgttttattccgctgttcaaacaaattctgagcgatcgtaataccctgagctttattctggaagaattcaaatccgatgaagaggtgattcagagcttttgcaaatacaaaacgctgctgcgcaatgaaaatgttctggaaactgccgaagcactgtttaacgaactgaatagcattgatctgacccacatctttatcagccacaaaaaactggaaaccatttcaagcgcactgtgtgatcattgggataccctgcgtaatgccctgtatgaacgtcgtattagcgaactgaccggtaaaattaccaaaagcgcgaaagaaaaagttcagcgcagtctgaaacatgaggatattaatctgcaagagattattagcgcagccggtaaagaactgtcagaagcatttaaacagaaaaccagcgaaattctgtcacatgcacatgcagcactggatcagccgctgccgaccaccctgaaaaaacaagaagaaaaagaaatcctgaaaagccagctggatagcctgctgggtctgtatcatctgctggactggtttgcagttgatgaaagcaatgaagttgatccggaatttagcgcacgtctgaccggcattaaactggaaatggaaccgagcctgagcttttataacaaagcccgtaattatgccaccaaaaaaccgtatagcgtcgaaaaattcaaactgaactttcagcgtccgaccctggcaagcggttgggatgttaataaagaaaaaaacaacggtgccatcctgttcgtgaaaaatggcctgtattatctgggtattatgccgaaacagaaaggtcgttataaagcgctgagctttgaaccgacggaaaaaaccagtgaaggttttgataaaatgtactacgactattttccggatgcagccaaaatgattccgaaatgtagcacccagctgaaagcagttaccgcacattttcagacccataccaccccgattctgctgagcaataactttattgaaccgctggaaatcaccaaagagatctacgatctgaataacccggaaaaagagccgaaaaaattccagaccgcatatgcaaaaaaaaccggtgatcagaaaggttatcgtgaagcgctgtgtaaatggattgatttcacccgtgattttctgagcaaatacaccaaaaccaccagtatcgatctgagcagcctgcgtccgagcagccagtataaagatctgggcgaatattatgcagaactgaatccgctgctgtatcatattagctttcagcgtattgccgagaaagaaatcatggacgcagttgaaaccggtaaactgtacctgttccagatctacaataaagattttgccaaaggccatcatggcaaaccgaatctgcataccctgtattggaccggtctgtttagccctgaaaatctggcaaaaacctcgattaaactgaatggtcaggcggaactgttttatcgtccgaaaagccgtatgaaacgtatggcacatcgtctgggtgaaaaaatgctgaacaaaaaactgaaagaccagaaaaccccgatcccggatacactgtatcaagaactgtatgattatgtgaaccatcgtctgagccatgatctgagtgatgaagcacgtgccctgctgccgaatgttattaccaaagaagttagccacgagatcattaaagatcgtcgttttaccagcgacaaattcctgtttcatgtgccgattaccctgaattatcaggcagcaaatagcccgagcaaatttaaccagcgtgttaatgcatatctgaaagaacatccagaaacgccgattattggtattgatcgtggtgaacgtaacctgatttatatcaccgttattgatagcaccggcaaaatcctggaacagcgtagcctgaataccattcagcagtttgattaccagaaaaaactggataatcgcgagaaagaacgtgttgcagcacgtcaggcatggtcagttgttggtacaattaaagacctgaaacagggttatctgagccaggttattcatgaaattgtggatctgatgattcactatcaggccgttgttgtgctggaaaacctgaattttggctttaaaagcaaacgtaccggcattgcagaaaaagcagtttatcagcagttcgagaaaatgctgattgacaaactgaattgcctggtgctgaaagattatccggctgaaaaagttggtggtgttctgaatccgtatcagctgaccgatcagtttaccagctttgcaaaaatgggcacccagagcggatttctgttttatgttccggcaccgtatacgagcaaaattgatccgctgaccggttttgttgatccgtttgtttggaaaaccatcaaaaaccatgaaagccgcaaacattttctggaaggtttcgattttctgcattacgacgttaaaacgggtgatttcatcctgcactttaaaatgaatcgcaatctgagttttcagcgtggcctgcctggttttatgcctgcatgggatattgtgtttgagaaaaacgaaacacagttcgatgcaaaaggcaccccgtttattgcaggtaaacgtattgttccggtgattgaaaatcatcgtttcaccggtcgttatcgcgatctgtatccggcaaatgaactgatcgcactgctggaagagaaaggtattgtttttcgtgatggctcaaacattctgccgaaactgctggaaaatgatgatagccatgcaattgataccatggttgcactgattcgtagcgttctgcagatgcgtaatagcaatgcagcaaccggtgaagattacattaatagtccggttcgtgatctgaatggtgtttgttttgatagccgttttcagaatccggaatggccgatggatgcagatgcaaatggtgcatatcatattgcactgaaaggacagctgctgctgaaccacctgaaagaaagcaaagatctgaaactgcaaaacggcattagcaatcaggattggctggcatatatccaagaactgcgtaacggtcgtagcagtgatgatgaagcaaccgcagatagccagcatgcagcaccgcctaaaaagaaacgtaaagttggtggtagcggtggttcaggtggtagtggcggtagtggtggctcagggggttctggtggctctggtggtagcctcgagcaccaccaccaccaccac

SEQ ID NO: 1117 - DNA, 4083 bp, synthetic construct
  misc_feature 1..4083: note = Cpf1
  misc_feature 4024..4044: note = NLS
  misc_feature 4066..4083: note = His tag
  source 1..4083: mol_type = other DNA
atgggtcgggatccaggtaaaccgattccgaatccgctgctgggtctggatagcaccgcaccgaaaaaaaaacgtaaagttggtattcatggtgttccggcagcaacccagtttgaaggtttcaccaatctgtatcaggttagcaaaaccctgcgttttgaactgattccgcagggtaaaaccctgaaacatattcaagaacagggcttcatcgaagaggataaagcacgtaacgatcactacaaagaactgaaaccgattatcgaccgcatctataaaacctatgcagatcagtgtctgcagctggttcagctggattgggaaaatctgagcgcagcaattgatagttatcgcaaagaaaaaaccgaagaaacccgtaatgcactgattgaagaacaggcaacctatcgtaatgccatccatgattatttcattggtcgtaccgataatctgaccgatgcaattaacaaacgtcacgccgaaatctataaaggcctgtttaaagccgaactgtttaatggcaaagttctgaaacagctgggcaccgttaccaccaccgaacatgaaaatgcactgctgcgtagctttgataaattcaccacctatttcagcggcttttatgagaatcgcaaaaacgtgtttagcgcagaagatattagcaccgcaattccgcatcgtattgtgcaggataatttcccgaaattcaaagagaactgccacatttttacccgtctgattaccgcagttccgagcctgcgtgaacattttgaaaacgttaaaaaagccatcggcatctttgttagcaccagcattgaagaagtttttagcttcccgttttacaatcagctgctgacccagacccagattgatctgtataaccaactgctgggtggtattagccgtgaagcaggcaccgaaaaaatcaaaggtctgaatgaagtgctgaatctggccattcagaaaaatgatgaaaccgcacatattattgcaagcctgccgcatcgttttattccgctgttcaaacaaattctgagcgatcgtaataccctgagctttattctggaagaattcaaatccgatgaagaggtgattcagagcttttgcaaatacaaaacgctgctgcgcaatgaaaatgttctggaaactgccgaagcactgtttaacgaactgaatagcattgatctgacccacatctttatcagccacaaaaaactggaaaccatttcaagcgcactgtgtgatcattgggataccctgcgtaatgccctgtatgaacgtcgtattagcgaactgaccggtaaaattaccaaaagcgcgaaagaaaaagttcagcgcagtctgaaacatgaggatattaatctgcaagagattattagcgcagccggtaaagaactgtcagaagcatttaaacagaaaaccagcgaaattctgtcacatgcacatgcagcactggatcagccgctgccgaccaccctgaaaaaacaagaagaaaaagaaatcctgaaaagccagctggatagcctgctgggtctgtatcatctgctggactggtttgcagttgatgaaagcaatgaagttgatccggaatttagcgcacgtctgaccggcattaaactggaaatggaaccgagcctgagcttttataacaaagcccgtaattatgccaccaaaaaaccgtatagcgtcgaaaaattcaaactgaactttcagatgccgaccctggcaagcggttgggatgttaataaagaaaaaaacaacggtgccatcctgttcgtgaaaaatggcctgtattatctgggtattatgccgaaacagaaaggtcgttataaagcgctgagctttgaaccgacggaaaaaaccagtgaaggttttgataaaatgtactacgactattttccggatgcagccaaaatgattccgaaatgtagcacccagctgaaagcagttaccgcacattttcagacccataccaccccgattctgctgagcaataactttattgaaccgctggaaatcaccaaagagatctacgatctgaataacccggaaaaagagccgaaaaaattccagaccgcatatgcaaaaaaaaccggtgatcagaaaggttatcgtgaagcgctgtgtaaatggattgatttcacccgtgattttctgagcaaatacaccaaaaccaccagtatcgatctgagcagcctgcgtccgagcagccagtataaagatctgggcgaatattatgcagaactgaatccgctgctgtatcatattagctttcagcgtattgccgagaaagaaatcatggacgcagttgaaaccggtaaactgtacctgttccagatctacaataaagattttgccaaaggccatcatggcaaaccgaatctgcataccctgtattggaccggtctgtttagccctgaaaatctggcaaaaacctcgattaaactgaatggtcaggcggaactgttttatcgtccgaaaagccgtatgaaacgtatggcacatcgtctgggtgaaaaaatgctgaacaaaaaactgaaagaccagaaaaccccgatcccggatacactgtatcaagaactgtatgattatgtgaaccatcgtctgagccatgatctgagtgatgaagcacgtgccctgctgccgaatgttattaccaaagaagttagccacgagatcattaaagatcgtcgttttaccagcgacaaattcttttttcatgtgccgattaccctgaattatcaggcagcaaatagcccgagcaaatttaaccagcgtgttaatgcatatctgaaagaacatccagaaacgccgattattggtattgatcgtggtgaacgtaacctgatttatatcaccgttattgatagcaccggcaaaatcctggaacagcgtagcctgaataccattcagcagtttgattaccagaaaaaactggataatcgcgagaaagaacgtgttgcagcacgtcaggcatggtcagttgttggtacaattaaagacctgaaacagggttatctgagccaggttattcatgaaattgtggatctgatgattcactatcaggccgttgttgtgctggaaaacctgaattttggctttaaaagcaaacgtaccggcattgcagaaaaagcagtttatcagcagttcgagaaaatgctgattgacaaactgaattgcctggtgctgaaagattatccggctgaaaaagttggtggtgttctgaatccgtatcagctgaccgatcagtttaccagctttgcaaaaatgggcacccagagcggatttctgttttatgttccggcaccgtatacgagcaaaattgatccgctgaccggttttgttgatccgtttgtttggaaaaccatcaaaaaccatgaaagccgcaaacattttctggaaggtttcgattttctgcattacgacgttaaaacgggtgatttcatcctgcactttaaaatgaatcgcaatctgagttttcagcgtggcctgcctggttttatgcctgcatgggatattgtgtttgagaaaaacgaaacacagttcgatgcaaaaggcaccccgtttattgcaggtaaacgtattgttccggtgattgaaaatcatcgtttcaccggtcgttatcgcgatctgtatccggcaaatgaactgatcgcactgctggaagagaaaggtattgtttttcgtgatggctcaaacattctgccgaaactgctggaaaatgatgatagccatgcaattgataccatggttgcactgattcgtagcgttctgcagatgcgtaatagcaatgcagcaaccggtgaagattacattaatagtccggttcgtgatctgaatggtgtttgttttgatagccgttttcagaatccggaatggccgatggatgcagatgcaaatggtgcatatcatattgcactgaaaggacagctgctgctgaaccacctgaaagaaagcaaagatctgaaactgcaaaacggcattagcaatcaggattggctggcatatatccaagaactgcgtaaccctaaaaaaaaacgcaaagtgaagcttgcggccgcactcgagcaccaccaccaccaccac

SEQ ID NO: 1118 - DNA, 304 bp, Homo sapiens
  source 1..304: mol_type = other DNA
tcctaaagcttggaacactttcccttccttaagaaccatccttgctactcagctgcaatcaatccagcccccaggtcttcactgaaccttttcccatctcttccaaaacatctgtttctgagaagtcctgtcctatagaggtctttcttcccaccggatttctcctacaccatttactcccacttgcagaactcccgtgtacaagtgtctttactgcttttatttgctcatcaaaatgcacatctcatataaaaataaatgaggagcatgcacacaccacaaacacaaacaggcatgcagaaat

SEQ ID NO: 1119 - DNA, 665 bp, Homo sapiens
  source 1..665: mol_type = other DNA
ataaagatgaacccatagtgagctgagagctccagcctggcctccagataactacacaccaagcttccacccagaatcaagcctatgttaacttccctcaaagcctgagattttgccttcccattaaatgcaggtagttgttccccttcaagcactagtcactggccataatttaaatcttgctatcttcttgccaccatgaaccctgtatgttgtaggctgaagacgttaaaagaaacacacgctgacacacacacacacacgcgcgcgcgcacacacacacacacacacagagctgactttcaaaatctactccagcccaaatgtttcaattgttcctcacccctggacatactttgcccccatctggaattaaaggatataagtttgtaatgaagcattagcagcattttatatgtgtccagctgatataggaatagccttagcaatgtatgtttggccaccaaagttccccactttgactgagccaatatatgccttctgcctgcatctttttaacgaccatacttgtcctgcctccagatagatgttttaaaacaacaaaaatgagggaaagatgaaagttctttctactggaatctaataaagaaaagtcattttcctcatttccacctctcttttctcaaagtcaaaattgtccatct

SEQ ID NO: 1120 - DNA, 165 bp, Homo sapiens
  source 1..165: mol_type = other DNA
ccctaaaacattaccactgggtctcagcccagttagtcctctgcagtttcttcacccccaaccccagtatcttcaaacagctcacaccctgctgtgctcagatcaatactccgttgtctaagttgcctcgagactaaaggcaacagggctgaaacatctcctgga

SEQ ID NO: 1121 - DNA, 122 bp, Homo sapiens
  source 1..122: mol_type = other DNA
ctgtgagattgacaagaacagtttgacagtcagaaggtgccacaaatcctgagaagcgacctggacttttgccaggcacagggtccttccttccctcccttgtcctggtcaccagagcctac

SEQ ID NO: 1122 - DNA, 24 bp, Homo sapiens
  source 1..24: mol_type = other DNA
gccgccggcccctggcctcactgg

SEQ ID NO: 1123 - DNA, 33 bp, Homo sapiens
  source 1..33: mol_type = other DNA
ccttgtcaaggctattggtcaaggcaaggctgg

SEQ ID NO: 1124 - DNA, 36 bp, Homo sapiens
  source 1..36: mol_type = other DNA
tgagatagtgtggggaaggggcccccaagaggatac

SEQ ID NO: 1125 - DNA, 41 bp, Homo sapiens
  source 1..41: mol_type = other DNA
tatagcctttgccttgttccgattcagtcattccagttttt

SEQ ID NO: 1126 - DNA, 114 bp, Homo sapiens
  source 1..114: mol_type = other DNA
tcttccctttagctagtttccttctcccatcatagaggataccaggacttcttttgtcagccgttttttaccttcttgtctctagctccagtgaggcctgtagtttaaagctaa

SEQ ID NO: 1127 - DNA, 86 bp, Homo sapiens
  source 1..86: mol_type = other DNA
ccacagtttcagcgcagtaatagattagtgttacataatataagacctaatgcttacctcaatatctacttatccgtacctatttg

SEQ ID NO: 1128 - DNA, 142 bp, Homo sapiens
  source 1..142: mol_type = other DNA
tattcaggtatgtatgtatacaccagatgatgtgtatttaccactggataagtgtgtgtgctggctgatgacccagggttttggcgtagctcttctatgctcagtaaagatgatggtagaatgttctttggcaggtactgtg

SEQ ID NO: 1129 - DNA, 697 bp, Homo sapiens
  source 1..697: mol_type = other DNA
caataaagatgaacccatagtgagctgagagctccagcctggcctccagataactacacaccaagcttccacccagaatcaagcctatgttaacttccctcaaagcctgagattttgctttcccattaaatgcaggtagttgttcttcttgcagcactagtcactggccataatttaaatcttgttatcttcttgccaccatgaaccctgtatgctgtaggctgaaaacgttaaaagaaacacacgctctcacacacacacaaacacacgcgcgcacacacacacacacacacacagagctgactttcaaaatctactccagcccaaatgtttcaattgttcctcacccctggacatactttgcccccatctggaattaaaggatataagtttgtaatgaagcattagcagcattttatatgtgtccagctgatataggaatagccttagcaatgtatgtttggccaccaaagttccccactttgactgagccaatatatgccttctgcctgcatctttttaatgaccatacttgtcctgcctccagatagatgttttaaaacgaataacaaaaataggggaaaggtgaaagttctttctaccgaaatctaataaagaaaagtcattttcctcatttccacctctcttttctcaaagtcaaagttgtccatctagattttcagaggcactccttagg

SEQ ID NO: 1130 - DNA, 185 bp, Homo sapiens
  source 1..185: mol_type = other DNA
ccctaaaacattgccactgggtctcagcccagttagtcctctgcagtttcttcactcccaaccccagtatcttcaaacagctcacaccctgctgtgctcagatcaatactcagttgtctaagttgcctcgagactaaaggcaacagtgctgaaacatctcctggactcaccttgaagttctcagg

SEQ ID NO: 1131 - DNA, 137 bp, Homo sapiens
  source 1..137: mol_type = other DNA
agcctgtgagattgacaagaacagtttgacagtcagaaggtgccacaaatcctgagaagcgacctggacttttgccaggcacagggtccttccttccctcccttgtcctggtcaccagagcctaccttcccagggtt

SEQ ID NO: 1132 - DNA, 38 bp, Homo sapiens
  source 1..38: mol_type = other DNA
ccgccggcccctggcctcactggatactctaagactat

SEQ ID NO: 1133 - DNA, 31 bp, Homo sapiens
  source 1..31: mol_type = other DNA
ccttgtcaaggctattggtcaaggcaaggct

SEQ ID NO: 1134 - DNA, 75 bp, Homo sapiens
  source 1..75: mol_type = other DNA
cagggaccgtttcagacagatatttgcattgagatagtgtggggaaggggcccccaagaggatactgctgcttaa

SEQ ID NO: 1135 - DNA, 29 bp, Homo sapiens
  source 1..29: mol_type = other DNA
ttgccttgttccgattcagtcattccaat

SEQ ID NO: 1136 - DNA, 104 bp, Homo sapiens
  source 1..104: mol_type = other DNA
tttagctagttttcttctcccaccatagaagataccaggacttcttttgtcagccgtttttcaccttcttgtctgtagctccagtgaggcctgtagtttaaagt

SEQ ID NO: 1137 - DNA, 38 bp, Homo sapiens
  source 1..38: mol_type = other DNA
ggacacgtcttagtctcatttagtaagcattggtttcc

SEQ ID NO: 1138 - DNA, 124 bp, Homo sapiens
  source 1..124: mol_type = other DNA
ttttttatattcaggtatgtatgtaggcacccgatgatgtgtatttatcactggataagtgtatgtgctggctgatgacccagggttttggtgtagctcttctatgctcggtaaagatgatggt

SEQ ID NO: 1139 - RNA, 20 nt, synthetic construct
  misc_feature 1..20: note = gRNA targeting domain - AsCpf1 HBG1 Promoter-1
  source 1..20: mol_type = other RNA
agacagatatttgcattgag

SEQ ID NO: 1140 - DNA, 20 bp, synthetic construct
  misc_feature 1..20: note = gRNA targeting domain - AsCpf1 HBG1 Promoter-1
  source 1..20: mol_type = other DNA
agacagatatttgcattgag

SEQ ID NO: 1141 - RNA, 20 nt, synthetic construct
  misc_feature 1..20: note = gRNA targeting domain - AsCpf1 HBG1 Promoter-2
  source 1..20: mol_type = other RNA
cattgagatagtgtggggaa

SEQ ID NO: 1142 - DNA, 20 bp, synthetic construct
  misc_feature 1..20: note = gRNA targeting domain - AsCpf1 HBG1 Promoter-2
  source 1..20: mol_type = other DNA
cattgagatagtgtggggaa

SEQ ID NO: 1143 - RNA, 20 nt, synthetic construct
  misc_feature 1..20: note = gRNA targeting domain - AsCpf1 HBG1 Promoter-3
  source 1..20: mol_type = other RNA
tagcctttgccttgttccga

SEQ ID NO: 1144 - DNA, 20 bp, synthetic construct
  misc_feature 1..20: note = gRNA targeting domain - AsCpf1 HBG1 Promoter-3
  source 1..20: mol_type = other DNA
tagcctttgccttgttccga

SEQ ID NO: 1145 - RNA, 20 nt, synthetic construct
  misc_feature 1..20: note = gRNA targeting domain - AsCpf1 HBG1 Promoter-4
  source 1..20: mol_type = other RNA
ccttgttccgattcagtcat

SEQ ID NO: 1146 - DNA, 20 bp, synthetic construct
  misc_feature 1..20: note = gRNA targeting domain - AsCpf1 HBG1 Promoter-4
  source 1..20: mol_type = other DNA
ccttgttccgattcagtcat

SEQ ID NO: 1147 - RNA, 20 nt, synthetic construct
  misc_feature 1..20: note = gRNA targeting domain - AsCpf1 HBG1 Promoter-5
  source 1..20: mol_type = other RNA
tctaatttattcttcccttt

SEQ ID NO: 1148 - DNA, 20 bp, synthetic construct
  misc_feature 1..20: note = gRNA targeting domain - AsCpf1 HBG1 Promoter-5
  source 1..20: mol_type = other DNA
tctaatttattcttcccttt

SEQ ID NO: 1149 - RNA, 20 nt, synthetic construct
  misc_feature 1..20: note = gRNA targeting domain - AsCpf1 HBG1 Promoter-6
  source 1..20: mol_type = other RNA
cttctcccatcatagaggat

SEQ ID NO: 1150 - DNA, 20 bp, synthetic construct
  misc_feature 1..20: note = gRNA targeting domain - AsCpf1 HBG1 Promoter-6
  source 1..20: mol_type = other DNA
cttctcccatcatagaggat

SEQ ID NO: 1151 - RNA, 20 nt, synthetic construct
  misc_feature 1..20: note = gRNA targeting domain - AsCpf1 HBG2 Promoter-7
  source 1..20: mol_type = other RNA
ttctcccaccatagaagata

SEQ ID NO: 1152 - DNA, 20 bp, synthetic construct
  misc_feature 1..20: note = gRNA targeting domain - AsCpf1 HBG2 Promoter-7
  source 1..20: mol_type = other DNA
ttctcccaccatagaagata

SEQ ID NO: 1153 - RNA, 20 nt, synthetic construct
  misc_feature 1..20: note = gRNA targeting domain - AsCpf1 HBG1 Promoter-8
  source 1..20: mol_type = other RNA
ccactggataagtgtgtgtg

SEQ ID NO: 1154 - DNA, 20 bp, synthetic construct
  misc_feature 1..20: note = gRNA targeting domain - AsCpf1 HBG1 Promoter-8
  source 1..20: mol_type = other DNA
ccactggataagtgtgtgtg

SEQ ID NO: 1155 - RNA, 20 nt, synthetic construct
  misc_feature 1..20: note = gRNA targeting domain - AsCpf1 HBG1 Promoter-9
  source 1..20: mol_type = other RNA
gcgtagctcttctatgctca

SEQ ID NO: 1156 - DNA, 20 bp, synthetic construct
  misc_feature 1..20: note = gRNA targeting domain - AsCpf1 HBG1 Promoter-9
  source 1..20: mol_type = other DNA
gcgtagctcttctatgctca

SEQ ID NO: 1157 - RNA, 20 nt, synthetic construct
  misc_feature 1..20: note = gRNA targeting domain - AsCpf1 HBG1 Promoter-10
  source 1..20: mol_type = other RNA
ctgagcatagaagagctacg

SEQ ID NO: 1158 - DNA, 20 bp, synthetic construct
  misc_feature 1..20: note = gRNA targeting domain - AsCpf1 HBG1 Promoter-10
  source 1..20: mol_type = other DNA
ctgagcatagaagagctacg

SEQ ID NO: 1159 - RNA, 20 nt, synthetic construct
  misc_feature 1..20: note = gRNA targeting domain - AsCpf1 HBG2 Promoter-11
  source 1..20: mol_type = other RNA
tcactggataagtgtatgtg

SEQ ID NO: 1160 - DNA, 20 bp, synthetic construct
  misc_feature 1..20: note = gRNA targeting domain - AsCpf1 HBG2 Promoter-11
  source 1..20: mol_type = other DNA
tcactggataagtgtatgtg

SEQ ID NO: 1161 - RNA, 20 nt, synthetic construct
  misc_feature 1..20: note = gRNA targeting domain - AsCpf1 HBG2 Promoter-12
  source 1..20: mol_type = other RNA
gtgtagctcttctatgctcg

SEQ ID NO: 1162 - DNA, 20 bp, synthetic construct
  misc_feature 1..20: note = gRNA targeting domain - AsCpf1 HBG2 Promoter-12
  source 1..20: mol_type = other DNA
gtgtagctcttctatgctcg

SEQ ID NO: 1163 - RNA, 20 nt, synthetic construct
  misc_feature 1..20: note = gRNA targeting domain - AsCpf1 HBG2 Promoter-13
  source 1..20: mol_type = other RNA
ccgagcatagaagagctaca

SEQ ID NO: 1164 - DNA, 20 bp, synthetic construct
  misc_feature 1..20: note = gRNA targeting domain - AsCpf1 HBG2 Promoter-13
  source 1..20: mol_type = other DNA
ccgagcatagaagagctaca

SEQ ID NO: 1165-1166 - skipped (2 entries)

SEQ ID NO: 1167 - RNA, 20 nt, synthetic construct
  misc_feature 1..20: note = gRNA targeting domain - AsCpf1 RR HBG1 Promoter-1
  source 1..20: mol_type = other RNA
gacagatatttgcattgaga

SEQ ID NO: 1168 - DNA, 20 bp, synthetic construct
  misc_feature 1..20: note = gRNA targeting domain - AsCpf1 RR HBG1 Promoter-1
  source 1..20: mol_type = other DNA
gacagatatttgcattgaga

SEQ ID NO: 1169 - RNA, 20 nt, synthetic construct
  misc_feature 1..20: note = gRNA targeting domain - AsCpf1 RR HBG1 Promoter-2
  source 1..20: mol_type = other RNA
acactatctcaatgcaaata

SEQ ID NO: 1170 - DNA, 20 bp, synthetic construct
  misc_feature 1..20: note = gRNA targeting domain - AsCpf1 RR HBG1 Promoter-2
  source 1..20: mol_type = other DNA
acactatctcaatgcaaata

SEQ ID NO: 1171 - RNA, 20 nt, synthetic construct
  misc_feature 1..20: note = gRNA targeting domain - AsCpf1 RR HBG1 Promoter-3
  source 1..20: mol_type = other RNA
cacactatctcaatgcaaat

SEQ ID NO: 1172 - DNA, 20 bp, synthetic construct
  misc_feature 1..20: note = gRNA targeting domain - AsCpf1 RR HBG1 Promoter-3
  source 1..20: mol_type = other DNA
cacactatctcaatgcaaat

SEQ ID NO: 1173 - RNA, 20 nt, synthetic construct
  misc_feature 1..20: note = gRNA targeting domain - AsCpf1 RR HBG1 Promoter-4
  source 1..20: mol_type = other RNA
ccacactatctcaatgcaaa

SEQ ID NO: 1174 - DNA, 20 bp, synthetic construct
  misc_feature 1..20: note = gRNA targeting domain - AsCpf1 RR HBG1 Promoter-4
  source 1..20: mol_type = other DNA
ccacactatctcaatgcaaa

SEQ ID NO: 1175 - RNA, 20 nt, synthetic construct
  misc_feature 1..20: note = gRNA targeting domain - AsCpf1 RR HBG1 Promoter-5
  source 1..20: mol_type = other RNA
ttccccacactatctcaatg

SEQ ID NO: 1176 - DNA, 20 bp, synthetic construct
  misc_feature 1..20: note = gRNA targeting domain - AsCpf1 RR HBG1 Promoter-5
  source 1..20: mol_type = other DNA
ttccccacactatctcaatg

SEQ ID NO: 1177 - RNA, 20 nt, synthetic construct
  misc_feature 1..20: note = gRNA targeting domain - AsCpf1 RR HBG1 Promoter-6
  source 1..20: mol_type = other RNA
gattcagtcattccagtttt

SEQ ID NO: 1178 - DNA, 20 bp, synthetic construct
  misc_feature 1..20: note = gRNA targeting domain - AsCpf1 RR HBG1 Promoter-6
  source 1..20: mol_type = other DNA
gattcagtcattccagtttt

SEQ ID NO: 1179 - RNA, 20 nt, synthetic construct
  misc_feature 1..20: note = gRNA targeting domain - AsCpf1 RR HBG1 Promoter-7
  source 1..20: mol_type = other RNA
attcagtcattccagttttt

SEQ ID NO: 1180 - DNA, 20 bp, synthetic construct
  misc_feature 1..20: note = gRNA targeting domain - AsCpf1 RR HBG1 Promoter-7
  source 1..20: mol_type = other DNA
attcagtcattccagttttt

SEQ ID NO: 1181 - RNA, 20 nt, synthetic construct
  misc_feature 1..20: note = gRNA targeting domain - AsCpf1 RR HBG1 Promoter-8
  source 1..20: mol_type = other RNA
gtcattccagtttttctcta

SEQ ID NO: 1182 - DNA, 20 bp, synthetic construct
  misc_feature 1..20: note = gRNA targeting domain - AsCpf1 RR HBG1 Promoter-8
  source 1..20: mol_type = other DNA
gtcattccagtttttctcta

SEQ ID NO: 1183 - RNA, 20 nt, synthetic construct
  misc_feature 1..20: note = gRNA targeting domain - AsCpf1 RR HBG1 Promoter-9
  source 1..20: mol_type = other RNA
agtttttctctaatttattc

SEQ ID NO: 1184 - DNA, 20 bp, synthetic construct
  misc_feature 1..20: note = gRNA targeting domain - AsCpf1 RR HBG1 Promoter-9
  source 1..20: mol_type = other DNA
agtttttctctaatttattc

SEQ ID NO: 1185 - RNA, 20 nt, synthetic construct
  misc_feature 1..20: note = gRNA targeting domain - AsCpf1 RR HBG1 Promoter-10
  source 1..20: mol_type = other RNA
gtttttctctaatttattct

SEQ ID NO: 1186 - DNA, 20 bp, synthetic construct
  misc_feature 1..20: note = gRNA targeting domain - AsCpf1 RR HBG1 Promoter-10
  source 1..20: mol_type = other DNA
gtttttctctaatttattct

SEQ ID NO: 1187 - RNA, 20 nt, synthetic construct
  misc_feature 1..20: note = gRNA targeting domain - AsCpf1 RR HBG2 Promoter-11
  source 1..20: mol_type = other RNA
gattcagtcattccaatttt

SEQ ID NO: 1188 - DNA, 20 bp, synthetic construct
  misc_feature 1..20: note = gRNA targeting domain - AsCpf1 RR HBG2 Promoter-11
  source 1..20: mol_type = other DNA
caagaggatactgctgctta

SEQ ID NO: 1189 - RNA, 20 nt, synthetic construct
  misc_feature 1..20: note = gRNA targeting domain - AsCpf1 RR HBG2 Promoter-12
  source 1..20: mol_type = other RNA
attcagtcattccaattttt

SEQ ID NO: 1190 - DNA, 20 bp, synthetic construct
  misc_feature 1..20: note = gRNA targeting domain - AsCpf1 RR HBG2 Promoter-12
  source 1..20: mol_type = other DNA
aagaggatactgctgcttaa

SEQ ID NO: 1191 - RNA, 20 nt, synthetic construct
  misc_feature 1..20: note = gRNA targeting domain - AsCpf1 RR HBG2 Promoter-13
  source 1..20: mol_type = other RNA
gtcattccaatttttctcta

SEQ ID NO: 1192 - DNA, 20 bp, synthetic construct
  misc_feature 1..20: note = gRNA targeting domain - AsCpf1 RR HBG2 Promoter-13
  source 1..20: mol_type = other DNA
gattcagtcattccaatttt

SEQ ID NO: 1193 - RNA, 20 nt, synthetic construct
  misc_feature 1..20: note = gRNA targeting domain - AsCpf1 RR HBG2 Promoter-14
  source 1..20: mol_type = other RNA
aatttttctctaatttattc

SEQ ID NO: 1194 - DNA, 20 bp, synthetic construct
  misc_feature 1..20: note = gRNA targeting domain - AsCpf1 RR HBG2 Promoter-14
  source 1..20: mol_type = other DNA
attcagtcattccaattttt

SEQ ID NO: 1195 - RNA, 20 nt, synthetic construct
  misc_feature 1..20: note = gRNA targeting domain - AsCpf1 RR HBG2 Promoter-15
  source 1..20: mol_type = other RNA
atttttctctaatttattct

SEQ ID NO: 1196 - DNA, 20 bp, synthetic construct
  misc_feature 1..20: note = gRNA targeting domain - AsCpf1 RR HBG2 Promoter-15
  source 1..20: mol_type = other DNA
gtcattccaatttttctcta

SEQ ID NO: 1197 - RNA, 20 nt, synthetic construct
  misc_feature 1..20: note = gRNA targeting domain - AsCpf1 RR HBG2 Promoter-16
  source 1..20: mol_type = other RNA
ttctcccatcatagaggata

SEQ ID NO: 1198 - DNA, 20 bp, synthetic construct
  misc_feature 1..20: note = gRNA targeting domain - AsCpf1 RR HBG2 Promoter-16
  source 1..20: mol_type = other DNA
aatttttctctaatttattc

SEQ ID NO: 1199 - RNA, 20 nt, synthetic construct
  misc_feature 1..20: note = gRNA targeting domain - AsCpf1 RR HBG2 Promoter-17
  source 1..20: mol_type = other RNA
atcatagaggataccaggac

SEQ ID NO: 1200 - DNA, 20 bp, synthetic construct
  misc_feature 1..20: note = gRNA targeting domain - AsCpf1 RR HBG2 Promoter-17
  source 1..20: mol_type = other DNA
atttttctctaatttattct

SEQ ID NO: 1201 - RNA, 20 nt, synthetic construct
  misc_feature 1..20: note = gRNA targeting domain - AsCpf1 RR HBG1 Promoter-18
  source 1..20: mol_type = other RNA
accatagaagataccaggac

SEQ ID NO: 1202 - DNA, 20 bp, synthetic construct
  misc_feature 1..20: note = gRNA targeting domain - AsCpf1 RR HBG1 Promoter-18
  source 1..20: mol_type = other DNA
ttctcccatcatagaggata

SEQ ID NO: 1203 - RNA, 20 nt, synthetic construct
  misc_feature 1..20: note = gRNA targeting domain - AsCpf1 RR HBG1 Promoter-19
  source 1..20: mol_type = other RNA
cagtacctgccaaagaacat

SEQ ID NO: 1204 - DNA, 20 bp, synthetic construct
  misc_feature 1..20: note = gRNA targeting domain - AsCpf1 RR HBG1 Promoter-19
  source 1..20: mol_type = other DNA
atcatagaggataccaggac

SEQ ID NO: 1205 - RNA, 20 nt, synthetic construct
  misc_feature 1..20: note = gRNA targeting domain - AsCpf1 RR HBG2 Promoter-20
  source 1..20: mol_type = other RNA
tagtatctggtaaagagcat

SEQ ID NO: 1206 - DNA, 20 bp, synthetic construct
  misc_feature 1..20: note = gRNA targeting domain - AsCpf1 RR HBG2 Promoter-20
  source 1..20: mol_type = other DNA
accatagaagataccaggac

SEQ ID NO: 1207 - RNA, 20 nt, synthetic construct
  misc_feature 1..20: note = gRNA targeting domain - AsCpf1 RR HBG1 Promoter-21
  source 1..20: mol_type = other RNA
tcaatgcaaatatctgtctg

SEQ ID NO: 1208 - DNA, 20 bp, synthetic construct
  misc_feature 1..20: note = gRNA targeting domain - AsCpf1 RR HBG1 Promoter-21
  source 1..20: mol_type = other DNA
cagtacctgccaaagaacat

SEQ ID NO: 1209 - RNA, 20 nt, synthetic construct
  misc_feature 1..20: note = gRNA targeting domain - AsCpf1 RR HBG2 Promoter-22
  source 1..20: mol_type = other RNA
ctcttgggggccccttcccc

SEQ ID NO: 1210 - DNA, 20 bp, synthetic construct
  misc_feature 1..20: note = gRNA targeting domain - AsCpf1 RR HBG2 Promoter-22
  source 1..20: mol_type = other DNA
tagtatctggtaaagagcat

SEQ ID NO: 1211 - RNA, 20 nt, synthetic construct
  misc_feature 1..20: note = gRNA targeting domain - AsCpf1 RVR HBG1 Promoter-1
  source 1..20: mol_type = other RNA
gattcagtcattccaatttt

SEQ ID NO: 1212 - DNA, 20 bp, synthetic construct
  misc_feature 1..20: note = gRNA targeting domain - AsCpf1 RVR HBG1 Promoter-1
  source 1..20: mol_type = other DNA
tcaatgcaaatatctgtctg

SEQ ID NO: 1213 - RNA, 20 nt, synthetic construct
  misc_feature 1..20: note = gRNA targeting domain - AsCpf1 RVR HBG1 Promoter-2
  source 1..20: mol_type = other RNA
attcagtcattccaattttt

SEQ ID NO: 1214 - DNA, 20 bp, synthetic construct
  misc_feature 1..20: note = gRNA targeting domain - AsCpf1 RVR HBG1 Promoter-2
  source 1..20: mol_type = other DNA
ctcttgggggccccttcccc

SEQ ID NO: 1215 - RNA, 20 nt, synthetic construct
  misc_feature 1..20: note = gRNA targeting domain - AsCpf1 RVR HBG1 Promoter-3
  source 1..20: mol_type = other RNA
aaaaaaattagcagtatcct

SEQ ID NO: 1216 - DNA, 20 bp, synthetic construct
  misc_feature 1..20: note = gRNA targeting domain - AsCpf1 RVR HBG1 Promoter-3
  source 1..20: mol_type = other DNA
aaaaaaattagcagtatcct

SEQ ID NO: 1217 - RNA, 20 nt, synthetic construct
  misc_feature 1..20: note = gRNA targeting domain - AsCpf1 RVR HBG1 Promoter-4
  source 1..20: mol_type = other RNA
gcctttgccttgttccgatt

SEQ ID NO: 1218 - DNA, 20 bp, synthetic construct
  misc_feature 1..20: note = gRNA targeting domain - AsCpf1 RVR HBG1 Promoter-4
  source 1..20: mol_type = other DNA
gcctttgccttgttccgatt

SEQ ID NO: 1219 - RNA, 20 nt, synthetic construct
  misc_feature 1..20: note = gRNA targeting domain - AsCpf1 RVR HBG2 Promoter-5
  source 1..20: mol_type = other RNA
aaaaaaattaagcagcagta

SEQ ID NO: 1220 - DNA, 20 bp, synthetic construct
  misc_feature 1..20: note = gRNA targeting domain - AsCpf1 RVR HBG2 Promoter-5
  source 1..20: mol_type = other DNA
aaaaaaattaagcagcagta

SEQ ID NO: 1221 - RNA, 20 nt, synthetic construct
  misc_feature 1..20: note = gRNA targeting domain - AsCpf1 RVR HBG1 Promoter-6
  source 1..20: mol_type = other RNA
ctcagtaaagatgatggtag

SEQ ID NO: 1222 - DNA, 20 bp, synthetic construct
  misc_feature 1..20: note = gRNA targeting domain - AsCpf1 RVR HBG1 Promoter-6
  source 1..20: mol_type = other DNA
ctcagtaaagatgatggtag

SEQ ID NO: 1223 - RNA, 20 nt, synthetic construct
  misc_feature 1..20: note = gRNA targeting domain - AsCpf1 RVR HBG2 Promoter-7
  source 1..20: mol_type = other RNA
actggataagtgtatgtgct

SEQ ID NO: 1224 - DNA, 20 bp, synthetic construct
  misc_feature 1..20: note = gRNA targeting domain - AsCpf1 RVR HBG2 Promoter-7
  source 1..20: mol_type = other DNA
actggataagtgtatgtgct

SEQ ID NO: 1225 - RNA, 20 nt, synthetic construct
  misc_feature 1..20: note = gRNA targeting domain - AsCpf1 RVR HBG2 Promoter-8
  source 1..20: mol_type = other RNA
tgctggctgatgacccaggg

SEQ ID NO: 1226 - DNA, 20 bp, synthetic construct
  misc_feature 1..20: note = gRNA targeting domain - AsCpf1 RVR HBG2 Promoter-8
  source 1..20: mol_type = other DNA
tgctggctgatgacccaggg

SEQ ID NO: 1227 - RNA, 20 nt, synthetic construct
  misc_feature 1..20: note = gRNA targeting domain - AsCpf1 RVR HBG2 Promoter-9
  source 1..20: mol_type = other RNA
ctcggtaaagatgatggtag

SEQ ID NO: 1228 - DNA, 20 bp, synthetic construct
  misc_feature 1..20: note = gRNA targeting domain - AsCpf1 RVR HBG2 Promoter-9
  source 1..20: mol_type = other DNA
ctcggtaaagatgatggtag

SEQ ID NO: 1229 - RNA, 20 nt, synthetic construct
  misc_feature 1..20: note = gRNA targeting domain - AsCpf1 RVR HBG2 Promoter-10
  source 1..20: mol_type = other RNA
tggtaaagagcattctacca

SEQ ID NO: 1230 - DNA, 20 bp, synthetic construct
  misc_feature 1..20: note = gRNA targeting domain - AsCpf1 RVR HBG2 Promoter-10
  source 1..20: mol_type = other DNA
tggtaaagagcattctacca

SEQ ID NO: 1231 - skipped

SEQ ID NO: 1232 - RNA, 10 nt, synthetic construct
  misc_feature 1..10: note = +10 RNA gRNA 5' extension
  source 1..10: mol_type = other RNA
aagacctttt

SEQ ID NO: 1233 - RNA, 25 nt, synthetic construct
  misc_feature 1..25: note = +25 RNA gRNA 5' extension
  source 1..25: mol_type = other RNA
atgtgtttttgtcaaaagacctttt

SEQ ID NO: 1234 - RNA, 60 nt, synthetic construct
  misc_feature 1..60: note = +60 RNA gRNA 5' extension
  source 1..60: mol_type = other RNA
aggccagcttgccggttttttagtcgtgctgcttcatgtgtttttgtcaaaagacctttt

SEQ ID NO: 1235 - skipped

SEQ ID NO: 1236 - DNA, 10 bp, synthetic construct
  misc_feature 1..10: note = +10 DNA gRNA 5' extension
  source 1..10: mol_type = other DNA
aagacctttt

SEQ ID NO: 1237 - DNA, 25 bp, synthetic construct
  misc_feature 1..25: note = +25 DNA gRNA 5' extension
  source 1..25: mol_type = other DNA
atgtgtttttgtcaaaagacctttt

SEQ ID NO: 1238 - DNA, 60 bp, synthetic construct
  misc_feature 1..60: note = +60 DNA gRNA 5' extension
  source 1..60: mol_type = other DNA
aggccagcttgccggttttttagtcgtgctgcttcatgtgtttttgtcaaaagacctttt

SEQ ID NO: 1239 - DNA, 20 bp, synthetic construct
  misc_feature 1..20: note = +20 DNA gRNA 5' extension
  source 1..20: mol_type = other DNA
tttttgtcaaaagacctttt

SEQ ID NO: 1240 - DNA, 30 bp, synthetic construct
  misc_feature 1..30: note = +30 DNA gRNA 5' extension
  source 1..30: mol_type = other DNA
gcttcatgtgtttttgtcaaaagacctttt

SEQ ID NO: 1241 - DNA, 50 bp, synthetic construct
  misc_feature 1..50: note = +50 DNA gRNA 5' extension
  source 1..50: mol_type = other DNA
gccggttttttagtcgtgctgcttcatgtgtttttgtcaaaagacctttt

SEQ ID NO: 1242 - DNA, 40 bp, synthetic construct
  misc_feature 1..40: note = +40 DNA gRNA 5' extension
  source 1..40: mol_type = other DNA
tagtcgtgctgcttcatgtgtttttgtcaaaagacctttt

SEQ ID NO: 1243 - DNA, 20 bp, synthetic construct
  misc_feature 1..20: note = +20 DNA/2xPS gRNA 5' extension
  misc_feature 1..2: note = Linked by phosphorothioate (PS) bond
  misc_feature 2..3: note = Linked by phosphorothioate (PS) bond
  source 1..20: mol_type = other DNA
ccgaagttttcttcggtttt

SEQ ID NO: 1244 - DNA, 25 bp, synthetic construct
  misc_feature 1..25: note = +25 DNA/2xPS gRNA 5' extension
  misc_feature 1..2: note = Linked by phosphorothioate (PS) bond
  misc_feature 2..3: note = Linked by phosphorothioate (PS) bond
  source 1..25: mol_type = other DNA
tttttccgaagttttcttcggtttt

SEQ ID NO: 1245 - DNA, 30 bp, synthetic construct
  misc_feature 1..30: note = +30 DNA/2xPS gRNA 5' extension
  misc_feature 1..2: note = Linked by phosphorothioate (PS) bond
  misc_feature 2..3: note = Linked by phosphorothioate (PS) bond
  source 1..30: mol_type = other DNA
aacgctttttccgaagttttcttcggtttt

SEQ ID NO: 1246 - DNA, 41 bp, synthetic construct
  misc_feature 1..41: note = +41 DNA/2xPS gRNA 5' extension
  misc_feature 1..2: note = Linked by phosphorothioate (PS) bond
  misc_feature 2..3: note = Linked by phosphorothioate (PS) bond
  source 1..41: mol_type = other DNA
gcgttgttttcaacgctttttccgaagttttcttcggtttt

SEQ ID NO: 1247 - DNA, 62 bp, synthetic construct
  misc_feature 1..62: note = +62 DNA/2xPS gRNA 5' extension
  misc_feature 1..2: note = Linked by phosphorothioate (PS) bond
  misc_feature 2..3: note = Linked by phosphorothioate (PS) bond
  source 1..62: mol_type = other DNA
ggcttcttttgaagcctttttgcgttgttttcaacgctttttccgaagttttcttcggtttt

SEQ ID NO: 1248 - DNA, 25 bp, synthetic construct
  misc_feature 1..25: note = +25 DNA/2xPS gRNA 5' extension
  misc_feature 1..2: note = Linked by phosphorothioate (PS) bond
  misc_feature 2..3: note = Linked by phosphorothioate (PS) bond
  source 1..25: mol_type = other DNA
atgtgtttttgtcaaaagacctttt

SEQ ID NO: 1249 - DNA, 25 bp, synthetic construct
  misc_feature 1..25: note = +25 A gRNA 5' extension
  source 1..25: mol_type = other DNA
aaaaaaaaaaaaaaaaaaaaaaaaa

SEQ ID NO: 1250 - DNA, 25 bp, synthetic construct
  misc_feature 1..25: note = +25 T gRNA 5' extension
  source 1..25: mol_type = other DNA
ttttttttttttttttttttttttt

SEQ ID NO: 1251 - RNA, 25 nt, synthetic construct
  misc_feature 1..25: note = +25 RNA/2xPS gRNA 5' extension
  misc_feature 1..2: note = Linked by phosphorothioate (PS) bond
  misc_feature 1: note = Modified to contain 2'-O-methyl
  misc_feature 2: note = Modified to contain 2'-O-methyl
  misc_feature 2..3: note = Linked by phosphorothioate (PS) bond
  source 1..25: mol_type = other RNA
atgtgtttttgtcaaaagacctttt

SEQ ID NO: 1252 - RNA, 25 nt, synthetic construct
  misc_feature 1..25: note = +25 polyA RNA/2xPS gRNA 5' extension
  misc_feature 1..2: note = Linked by phosphorothioate (PS) bond
  misc_feature 1: note = Modified to contain 2'-O-methyl
  misc_feature 2: note = Modified to contain 2'-O-methyl
  misc_feature 2..3: note = Linked by phosphorothioate (PS) bond
  source 1..25: mol_type = other RNA
aaaaaaaaaaaaaaaaaaaaaaaaa

SEQ ID NO: 1253 - RNA, 25 nt, synthetic construct
  misc_feature 1..25: note = +25 polyU RNA/2xPS gRNA 5' extension
  misc_feature 1..2: note = Linked by phosphorothioate (PS) bond
  misc_feature 1: note = Modified to contain 2'-O-methyl
  misc_feature 2: note = Modified to contain 2'-O-methyl
  misc_feature 2..3: note = Linked by phosphorothioate (PS) bond
  source 1..25: mol_type = other RNA
ttttttttttttttttttttttttt

SEQ ID NO: 1254 - RNA, 21 nt, synthetic construct
  misc_feature 1..21: note = HBG1-1 21mer targeting domain
  source 1..21: mol_type = other RNA
ccttgtcaaggctattggtca

SEQ ID NO: 1255 - DNA, 21 bp, synthetic construct
  misc_feature 1..21: note = HBG1-1 21mer targeting domain
  source 1..21: mol_type = other DNA
ccttgtcaaggctattggtca

SEQ ID NO: 1256 - RNA, 22 nt, synthetic construct
  misc_feature 1..22: note = HBG1-1 22mer targeting domain
  source 1..22: mol_type = other RNA
ccttgtcaaggctattggtcaa

SEQ ID NO: 1257 - DNA, 22 bp, synthetic construct
  misc_feature 1..22: note = HBG1-1 22mer targeting domain
  source 1..22: mol_type = other DNA
ccttgtcaaggctattggtcaa

SEQ ID NO: 1258 - RNA, 23 nt, synthetic construct
  misc_feature 1..23: note = HBG1-1 23mer targeting domain
  source 1..23: mol_type = other RNA
ccttgtcaaggctattggtcaag

SEQ ID NO: 1259 - DNA, 23 bp, synthetic construct
  misc_feature 1..23: note = HBG1-1 23mer targeting domain
  source 1..23: mol_type = other DNA
ccttgtcaaggctattggtcaag

SEQ ID NO: 1260 - RNA, 21 nt, synthetic construct
  misc_feature 1..21: note = AsCpf1 HBG1 promoter-1 21mer targeting domain
  source 1..21: mol_type = other RNA
agacagatatttgcattgaga

SEQ ID NO: 1261 - DNA, 21 bp, synthetic construct
  misc_feature 1..21: note = AsCpf1 HBG1 promoter-1 21mer targeting domain
  source 1..21: mol_type = other DNA
agacagatatttgcattgaga

SEQ ID NO: 1262 - RNA, 21 nt, synthetic construct
  misc_feature 1..21: note = AsCpf1 HBG1 promoter-2 21mer targeting domain
  source 1..21: mol_type = other RNA
cattgagatagtgtggggaag

SEQ ID NO: 1263 - DNA, 21 bp, synthetic construct
  misc_feature 1..21: note = AsCpf1 HBG1 promoter-2 21mer targeting domain
  source 1..21: mol_type = other DNA
cattgagatagtgtggggaag

SEQ ID NO: 1264 - RNA, 21 nt, synthetic construct
  misc_feature 1..21: note = AsCpf1 HBG1 promoter-6 21mer targeting domain
  source 1..21: mol_type = other RNA
cttctcccatcatagaggata

SEQ ID NO: 1265 - DNA, 21 bp, synthetic construct
  misc_feature 1..21: note = AsCpf1 HBG1 promoter-6 21mer targeting domain
  source 1..21: mol_type = other DNA
cttctcccatcatagaggata

SEQ ID NO: 1266 - DNA, 20 bp, synthetic construct
  misc_feature 1..20: note = Forward primer
  source 1..20: mol_type = other DNA
catggcgtctggactaggag

SEQ ID NO: 1267 - DNA, 24 bp, synthetic construct
  misc_feature 1..24: note = Reverse primer
  source 1..24: mol_type = other DNA
aaacacatttcacaatccctgaac

SEQ ID NO: 1268 - DNA, 53 bp, synthetic construct
  misc_feature 1..53: note = OLI13753 forward primer
  source 1..53: mol_type = other DNA
acactctttccctacacgacgctcttccgatctcatggcgtctggactaggag

SEQ ID NO: 1269 - DNA, 58 bp, synthetic construct
  misc_feature 1..58: note = OLI13752 reverse primer
  source 1..58: mol_type = other DNA
gtgactggagttcagacgtgtgctcttccgatctaaacacatttcacaatccctgaac

SEQ ID NO: 1270 - DNA, 499 bp, synthetic construct
  misc_feature 1..499: note = AMP3322
  source 1..499: mol_type = other DNA
catggcgtctggactaggagcttattgataacctcagacgttccagaagcgagtgtgtggaactgctgaagggtgcttccttttattcttcatccctagccagccgccggcccctggcctcactggatactctaagactattggtcaagtttgccttgtcaaggctattggtcaaggcaaggctggccaacccatgggtggagtttagccagggaccgtttcagacagatatttgcattgagatagtgtggggaaggggcccccaagaggatactgctaattttttttatagcctttgccttgttccgattcagtcattccagtttttctctaatttattcttccctttagctagtttccttctcccatcatagaggataccaggacttcttttgtcagccgttttttaccttcttgtctctagctccagtgaggcctgtagtttaaagctaaagcatgtaccaatttttgaaaagttcagggattgtgaaatgtgttt

SEQ ID NO: 1271 - DNA, 25 bp, synthetic construct
  misc_feature 1..25: note = AD-P-6 ddPCR Assay6
  source 1..25: mol_type = other DNA
tccctgatgaacatagatgccaaca

SEQ ID NO: 1272 - DNA, 21 bp, synthetic construct
  misc_feature 1..21: note = AD33 ddPCT Assay6
  source 1..21: mol_type = other DNA
actgggaaagaacataaccaa

SEQ ID NO: 1273 - DNA, 22 bp, synthetic construct
  misc_feature 1..22: note = AD34 ddPCT Assay6
  source 1..22: mol_type = other DNA
gatatgctgtcggatgctatta

SEQ ID NO: 1274 - DNA, 26 bp, synthetic construct
  misc_feature 1..26: note = AD-P-9 ddPCT Assay9
  source 1..26: mol_type = other DNA
agaatgttctttggcaggtactgtgg

SEQ ID NO: 1275 - DNA, 20 bp, synthetic construct
  misc_feature 1..20: note = AD95 ddPCT Assay9
  source 1..20: mol_type = other DNA
cgtagctcttctatgctcag

SEQ ID NO: 1276 - DNA, 18 bp, synthetic construct
  misc_feature 1..18: note = AD96 ddPCT Assay9
  source 1..18: mol_type = other DNA
ccatgtacacgcacatct

SEQ ID NO: 1277 - DNA, 125 bp, synthetic construct
  misc_feature 1..125: note = Portion of BCL11A gene
  source 1..125: mol_type = other DNA
gaggtctgccagtcctcttctaccccacccacgcccccaccctaatcagaggccaaacccttcctggagcctgtgataaaagcaactgttagcttgcactagactagcttcaaagttgtattgac

SEQ ID NO: 1278 - DNA, 82 bp, synthetic construct
  misc_feature 1..82: note = Portion of HBG1 gene (1)
  source 1..82: mol_type = other DNA
gcctcactggatactctaagactattggtcaagtttgccttgtcaaggctattggtcaaggcaaggctggccaacccatggg

SEQ ID NO: 1279 - DNA, 82 bp, synthetic construct
  misc_feature 1..82: note = Portion of HBG1 gene (2)
  source 1..82: mol_type = other DNA
cggagtgacctatgagattctgataaccagttcaaacggaacagttccgataaccagttccgttccgaccggttgggtaccc

1-4. (canceled)

5. A first population of modified cells comprising:
a plurality of modified CD34+ or hematopoietic stem cells,
one or more of the plurality of modified cells including an indel in an HBG gene promoter, and
60% or more of the indels in the plurality of modified cells as a whole are deletions of at least 4 base pairs;
the indels generated by delivering a first RNP complex including a first gRNA and a Cpf1 RNA-guided nuclease or a modified Cpf1 RNA-guided nuclease to a first population of unmodified cells comprising a plurality of unmodified CD34+ or hematopoietic stem cells, the first gRNA including a first gRNA targeting domain.

6. The first population of modified cells of claim 5, wherein 25% or more of the indels in the plurality of modified cells as a whole are deletions of at least 4 base pairs and are introduced by a repair mechanism other than microhomology-mediated end joining (MMEJ) repair.

7. The first population of modified cells of claim 5, wherein 25% or more of the indels in the plurality of modified cells as a whole are deletions of at least 4 base pairs and are introduced by non-homologous end joining (NHEJ) repair.

8. The first population of modified cells of claim 5, wherein 50% or more of the indels in the plurality of modified cells as a whole are deletions between 1 base pair and 25 base pairs.

9. The first population of modified cells of claim 5, wherein 50% or more of the indels in the plurality of modified cells as a whole are deletions between 3 base pairs and 25 base pairs.

10. The first population of modified cells of claim 5, wherein 50% or more of the indels in the plurality of modified cells as a whole are deletions between 4 base pairs and 25 base pairs.

11-15. (canceled)

16. The first population of modified cells of claim 5, wherein the plurality of modified cells as a whole comprises the indels set forth in Table 32.

17. The first population of modified cells of claim 5, wherein the plurality of modified cells as a whole comprises at least 10% more deletions of at least 4 base pairs than a second population of modified cells comprising a plurality of modified CD34+ or hematopoietic stem cells,
one or more modified cells in the second population of modified cells having an indel in an HBG gene promoter; and
the indels of the second population of modified cells generated by delivering a second RNP complex comprising a second gRNA and a Cas9 RNA-guided nuclease to a second population of unmodified cells comprising a plurality of unmodified CD34+ or hematopoietic stem cells, the second gRNA including a second gRNA targeting domain comprising SEQ ID NO:339.

18. The first population of modified cells of claim 5, wherein the plurality of modified cells as a whole comprises at least 10% more deletions of at least 4 base pairs introduced by an NHEJ repair mechanism than a second population of modified cells comprising a plurality of modified CD34+ or hematopoietic stem cells,
one or more modified cells in the second population of modified cells comprising an indel in an HBG gene promoter; and
the indels of the second population of modified cells generated by delivering a second RNP complex comprising a second gRNA and a Cas9 RNA-guided nuclease to a second population of unmodified cells comprising a plurality of unmodified CD34+ or hematopoietic stem cells, the second gRNA including a second gRNA targeting domain comprising SEQ ID NO:339.

19-30. (canceled)

31. A method of inducing expression of fetal hemoglobin (HbF) in a first population of modified cells comprising a plurality of modified CD34+ or hematopoietic stem cells, the method comprising:
delivering a first RNP complex including a first guide RNA (gRNA) and a Cpf1 RNA-guided nuclease or a modified Cpf1 RNA-guided nuclease to a first population of unmodified cells comprising a plurality of unmodified CD34+ or hematopoietic stem cells to generate indels, the first gRNA including a first gRNA targeting domain,
each modified CD34+ or hematopoietic stem cell comprising an indel in an HBG gene promoter,
60% or more of the indels in the plurality of modified cells as a whole are deletions of at least 4 base pairs;
the first population of modified cells comprising higher HbF levels than the first population of unmodified cells.

32. (canceled)

33. A method of decreasing sickling in a first population of red blood cells (RBCs) cultured from a first population of modified cells comprising a plurality of modified CD34+ cells from a subject having sickle cell disease, the method comprising:
a) delivering a first RNP complex including a first gRNA and a Cpf1 RNA-guided nuclease or a modified Cpf1 RNA-guided nuclease to a first population of unmodified cells comprising a plurality of unmodified CD34+ cells from the subject to generate indels, the first gRNA including a first gRNA targeting domain, each modified CD34+ cell comprising an indel in an HBG gene promoter, 60% or more of the indels in the plurality of modified CD34+ cells as a whole are deletions of at least 4 base pairs; and
b) culturing the first population of RBCs from the first population of cells comprising the plurality of modified CD34+ cells,
the first population of RBCs exhibiting significantly decreased sickling upon deoxygenation than a second population of RBCs comprising a plurality of RBCs cultured from the first population of unmodified cells.

34. The method of decreasing sickling of claim 33, wherein the first population of RBCs sickle at a significantly lower oxygen tension than the second population of RBCs.

35. The method of decreasing sickling of claim 34, wherein the oxygen tension is measured by relative oxygen pressure.

36. The method of decreasing sickling of claim 35, wherein the first population of RBCs has a significantly higher minimum elongation index upon deoxygenation than the second population of RBCs.

37. The method of decreasing sickling of claim 35, wherein the first population of RBCs have a significantly higher velocity upon deoxygenation than a second population of RBCs comprising a plurality of RBCs cultured from the first population of unmodified cells.

38. The method of decreasing sickling of claim 35, wherein the first population of RBCs comprises higher HbF levels than a second population of RBCs comprising a plurality of RBCs cultured from the first population of unmodified cells.

39-44. (canceled)

45. The method of inducing expression of HbF of claim 31, wherein 50% or more of the indels in the plurality of modified CD34+ or hematopoietic stem cells are deletions between 5 base pairs and 25 base pairs.

46. The method of inducing expression of HbF of claim 31, wherein the plurality of modified CD34+ or hematopoietic stem cells comprise the following deletions:
a HBG1/2 c.-104 to -121 deletion in a HBG1 promoter, HBG2 promoter, or a combination thereof, the HBG1/2 c.-104 to -121 deletion making up 2% or more of the indels in the plurality of modified cells as a whole; and
a HBG1/2 c.-110 to -115 deletion in a HBG1 promoter, HBG2 promoter, or a combination thereof, the HBG1/2 c. -110 to -115 deletion making up 2% or more of the indels in the plurality of modified cells as a whole.

47. The method of inducing expression of HbF of claim 31, wherein the plurality of modified cells as a whole comprise the following deletions:
a HBG1/2 c.-104 to -121 deletion in a HBG1 promoter, HBG2 promoter, or a combination thereof, the HBG1/2 c.-104 to -121 deletion making up 1% to 15.5% of the indels in the plurality of modified cells as a whole;
a HBG1/2 c.-110 to -115 deletion in a HBG1 promoter, HBG2 promoter, or a combination thereof, the HBG1/2 c. -110 to -115 deletion making up 1% to 6% of the indels in the plurality of modified cells as a whole;
a HBG1/2 c.-112 to -115 deletion in a HBG1 promoter, HBG2 promoter, or a combination thereof, the HBG1/2 c.-112 to -115 deletion making up 1% to 6% of the indels in the plurality of modified cells as a whole;
a HBG1/2 c.-113 to -115 deletion in a HBG1 promoter, HBG2 promoter, or a combination thereof, the HBG1/2 c.-113 to -115 deletion making up 1% to 6% of the indels in the plurality of modified cells as a whole;
a HBG1/2 c.-111 to -115 deletion in a HBG1 promoter, HBG2 promoter, or a combination thereof, the HBG1/2 c.-111 to -115 deletion making up 1% to 6% of the indels in the plurality of modified cells as a whole;
a HBG1/2 c.-111 to -117 deletion in a HBG1 promoter, HBG2 promoter, or a combination thereof, the HBG1/2 c.-111 to -117 deletion making up 1% to 6% of the indels in the plurality of modified cells as a whole;
a HBG1/2 c.-102 to -114 deletion in a HBG1 promoter, HBG2 promoter, or a combination thereof, the HBG1/2 c.-102 to -114 deletion making up 1% to 6% of the indels in the plurality of modified cells as a whole;
a HBG1/2 c.-114 to -118 deletion in a HBG1 promoter, HBG2 promoter, or a combination thereof, the HBG1/2 c.-114 to -118 deletion making up 1% to 6% of the indels in the plurality of modified cells as a whole;
a HBG1/2 c.-112 to -116 deletion in a HBG1 promoter, HBG2 promoter, or a combination thereof, the HBG1/2 c.-112 to -116 deletion making up 1% to 6% of the indels in the plurality of modified cells as a whole; and
a HBG1/2 c.-113 to -117 deletion in a HBG1 promoter, HBG2 promoter, or a combination thereof, the HBG1/2 c.-113 to -117 deletion making up 1% to 6% of the indels in the plurality of modified cells as a whole.

48. The method of inducing expression of HbF of claim 31, wherein the plurality of modified cells as a whole comprises the indels set forth in Table 32.
